(19) United States
(12) Patent Application Publication
(10) Pub. No.: US 2023/0116704 A1
(43) Pub. Date: Apr. 13, 2023

(54) ANTISENSE OLIGOMERS FOR TREATMENT OF CONDITIONS AND DISEASES

(71) Applicant: Stoke Therapeutics, Inc., Bedford, MA (US)

(72) Inventors: Isabel Aznarez, Boston, MA (US); Zhou Han, Natick, MA (US); Anne Christiansen, Wayland, MA (US); Meena Meena, Belmont, MA (US); Baruch Ticho, Newton, MA (US); Gene Liau, Wayland, MA (US)

(21) Appl. No.: 17/832,182

(22) Filed: Jun. 3, 2022

Related U.S. Application Data
(63) Continuation of application No. PCT/US2020/063157, filed on Dec. 3, 2020.
(60) Provisional application No. 62/993,971, filed on Mar. 24, 2020.
(60) Provisional application No. 62/945,048, filed on Dec. 6, 2019.

(51) Int. Cl. C12N 15/113; A61P 25/08

(52) U.S. Cl. CPC C12N 15/1138; A61P 25/08; C12N 2310/11; C12N 2320/33; C12N 2310/321; C12N 2310/3341; C12N 2310/315

(57) ABSTRACT

Alternative splicing events in SCN1A gene can lead to non-productive mRNA transcripts which in turn can lead to aberrant protein expression, and therapeutic agents which can target the alternative splicing events in SCN1A gene can modulate the expression level of functional proteins in Dravet Syndrome patients and/or inhibit aberrant protein expression. Such therapeutic agents can be used to treat a condition caused by SCN1A, SCN8A or SCN5A protein deficiency.

### CROSS-REFERENCE

[0001] This application is a continuation application of International Application No.: PCT/US2020/063157 filed Dec. 3, 2020, which claims the benefit of U.S. Provisional Application No. 62/993,971, filed Mar. 24, 2020, and U.S. Provisional Application No. 62/945,048 filed Dec. 6, 2019, each of which is incorporated herein by reference in its entirety.

### SEQUENCE LISTING

[0002] The instant application contains a Sequence Listing which has been submitted electronically in ASCII format and is hereby incorporated by reference in its entirety. Said ASCII copy, created on Jan. 28, 2021, is named 47991-728_601_SL.txt and is 1,169,854 bytes in size.

### BACKGROUND

[0003] Nervous system disorders are often associated with channelopathy, characterized by the disturbed function of ion channels that mediate neuronal excitability, neuronal interactions, and brain functions at large. Mutations in the SCN1A gene, which is part of the SCN1A-SCN2A-SCN3A gene cluster that encodes alpha-pore forming subunits of the neuronal voltage gated sodium channel, can result in expression of Na_{V}1.1 protein (also termed as “Na_{V}1.1”) with reduced functions as compared to a wild-type Na_{V}1.1 protein, reduced expression of Na_{V}1.1, or both. Mutations in SCN1A gene are associated with development of disease number of diseases and conditions, such as Dravet Syndrome (DS) (Miller, et al., 1993-2015, GeneReviews, Eds. Pagon R A, et al. Seattle (Wash.): University of Washington, Seattle, Bookshelf ID: NBK1318, and Mulley, et al., 2005, Hum. Mutat. 25: 535-542).

### SUMMARY

[0004] Alternative splicing events in SCN1A gene can lead to non-productive mRNA transcripts which in turn can lead to aberrant protein expression, and therapeutic agents which can target the alternative splicing events in SCN1A gene can modulate the expression level of functional proteins in Dravet Syndrome patients and/or inhibit aberrant protein expression. Such therapeutic agents can be used to treat a condition caused by SCN1A, SCN8A or SCN5A protein deficiency.

[0005] Selecting the right dose, formulation, dosing regimen and patient population for a drug is a crucial step in the development of pharmaceutical drugs. For example, without adequate information on dosage, it is not possible for doctors to prescribe a drug to patients. For example, if a dose or dose range cannot be identified that allows safe and predictable administration, the drug cannot be a medically useful or commercially viable pharmaceutical product. Therefore, determining the correct drug dosage is a key question that needs to be addressed in clinical practice. The discovery of therapeutically effective dosages and dosage regimens of a drug needs to balance patient compliance, therapeutic efficacy and side effects of the drug; which requires substantial skills. For example, suitable dosages and dosage regimens may be discovered through a clinical trial that forms part of the approval process, requires substantial input of intellectual and financial resources of different parties, and is not within the routine of a medical practitioner. For example, patient compliance can be crucial for optimal treatment of various conditions. The more doses required or the more difficult the treatment plan, the less likely a patient is to comply; although medical agents have the ability to enhance patients' quality of life (QOL), they can only do so if they are used correctly. Thus, it is clear that selecting the right dose, formulation, dosing regimen and patient population for a drug is complex and unpredictable. Structurally similar compounds significantly differ in their solubility, toxicity, activity, stability, and pharmacological properties. Also, there are significant physiological differences between animal models and human subjects. Therefore, translating pre-clinical information into clinically effective therapy is an unpredictable and challenging task.

[0006] Provided herein are suitable dosages, formulations, dosing regimens and patient populations for treating or reducing the likelihood of developing a disease or condition characterized by a reduced expression or function of Na_{V}1.1 protein in a human subject in need thereof.

[0007] In some aspects, provided herein is a method of treating or reducing the likelihood of developing a disease or condition characterized by a reduced expression or function of Na_{V}1.1 protein in a human subject in need thereof, the method comprising administering to the human subject a pharmaceutical composition comprising an antisense oligomer (ASO) at a first dose of about 0.1, 0.5, 1, 2.5, 5, 6, 7, 8, 9, 10, 11, 12, 13, 14, 15, 16, 17, 18, 19, 20, 22.5, 25, 27.5, 30, 32.5, 35, 37.5, 40, 42.5, 45, 47.5, 50, 52.5, 55, 57.5, 60, 62.5, 65, 67.5, 70, 72.5, 75, 77.5, 80, 82.5, 85, 87.5, 90, 92.5, 95, 97.5, 100, 102.5, 105, 107.5, 110, 112.5, 115, 117.5, 120, 122.5, 125, 127.5, 130, 132.5, 135, 137.5, 140, 142.5, 145, 147.5, 150, 152.5, 155, 157.5, 160, 162.5, 165, 167.5, 170, 172.5, 175, 177.5, 180, 182.5, 185, 187.5, 190, 192.5, 195, 197.5, 200, 202.5, 205, 207.5, 210, 212.5, 215, 217.5, 220, 222.5, 225, 227.5, 230, 232.5, 235, 237.5, 240, 242.5, 245, 247.5, or 250 mg, wherein the ASO comprises a sequence with at least 80% sequence identity to any one of SEQ ID NOs: 21-67, 210-256 or 304-1099, thereby treating or reducing the likelihood of developing the disease or condition in the human subject.

[0008] In some aspects, provided herein is a use of an antisense oligomer (ASO) for the manufacture of a medicament for treating or preventing a disease or condition characterized by a reduced expression or function of Na_{V}1.1 protein in a human subject in need thereof, wherein the medicament is administered at a first dose of about 0.1, 0.5, 1, 2.5, 5, 6, 7, 8, 9, 10, 11, 12, 13, 14, 15, 16, 17, 18, 19, 20, 22.5, 25, 27.5, 30, 32.5, 35, 37.5, 40, 42.5, 45, 47.5, 50, 52.5, 55, 57.5, 60, 62.5, 65, 67.5, 70, 72.5, 75, 77.5, 80, 82.5, 85, 87.5, 90, 92.5, 95, 97.5, 100, 102.5, 105, 107.5, 110, 112.5, 115, 117.5, 120, 122.5, 125, 127.5, 130, 132.5, 135, 137.5, 140, 142.5, 145, 147.5, 150, 152.5, 155, 157.5, 160, 162.5, 165, 167.5, 170, 172.5, 175, 177.5, 180, 182.5, 185, 187.5, 190, 192.5, 195, 197.5, 200, 202.5, 205, 207.5, 210, 212.5, 215, 217.5, 220, 222.5, 225, 227.5, 230, 232.5, 235, 237.5, 240, 242.5, 245, 247.5, or 250 mg, and wherein the ASO comprises a sequence with at least 80% sequence identity to any one of SEQ ID NOs: 21-67, 210-256 or 304-1099.

[0009] In some aspects, provided herein is a use of an antisense oligomer (ASO) for the manufacture of a medicament for treating or preventing a disease or condition characterized by a reduced expression or function of Na_{V}1.1 protein in a human subject in need thereof, wherein the medicament is prepared to be administered at a first dose of about 0.1, 0.5, 1, 2.5, 5, 6, 7, 8, 9, 10, 11, 12, 13, 14, 15, 16, 17, 18, 19, 20, 22.5, 25, 27.5, 30, 32.5, 35, 37.5, 40, 42.5, 45, 47.5, 50, 52.5, 55, 57.5, 60, 62.5, 65, 67.5, 70, 72.5, 75, 77.5, 80, 82.5, 85, 87.5, 90, 92.5, 95, 97.5, 100, 102.5, 105, 107.5, 110, 112.5, 115, 117.5, 120, 122.5, 125, 127.5, 130, 132.5, 135, 137.5, 140, 142.5, 145, 147.5, 150, 152.5, 155, 157.5, 160, 162.5, 165, 167.5, 170, 172.5, 175, 177.5, 180, 182.5, 185, 187.5, 190, 192.5, 195, 197.5, 200, 202.5, 205, 207.5, 210, 212.5, 215, 217.5, 220, 222.5, 225, 227.5, 230, 232.5, 235, 237.5, 240, 242.5, 245, 247.5, or 250 mg, and wherein the ASO comprises a sequence with at least 80% sequence identity to any one of SEQ ID NOs: 21-67, 210-256 or 304-1099.

[0010] In some aspects, provided herein is a method of treating or reducing the likelihood of developing a disease or condition characterized by a reduced expression or function of Na_{V}1.1 protein in a human subject in need thereof, the method comprising administering to the human subject a pharmaceutical composition comprising a first dose of an antisense oligomer (ASO), wherein the ASO comprises a sequence with at least 80% sequence identity to any one of SEQ ID NOs: 21-67, 210-256 or 304-1099, thereby treating or reducing the likelihood of developing the disease or condition in the human subject; wherein the human subject is at most 18 years old at first dose.

[0011] In some aspects, provided herein is a method of treating or reducing the likelihood of developing a disease or condition characterized by a reduced expression or function of Na_{V}1.1 protein in a human subject in need thereof, the method comprising administering to the human subject a pharmaceutical composition comprising multiple doses of an antisense oligomer (ASO), wherein the ASO comprises a sequence with at least 80% sequence identity to any one of SEQ ID NOs: 21-67, 210-256 or 304-1099, thereby treating or reducing the likelihood of developing the disease or condition in the human subject.

[0012] In some embodiments, the first dose is the first of multiple doses.

[0013] In some embodiments, the human subject is at most 18 years old at first dose.

[0014] In some embodiments, the method comprises administering to the human subject a pharmaceutical composition comprising an ASO at a first dose of about 0.1, 0.5, 1, 2.5, 5, 6, 7, 8, 9, 10, 11, 12, 13, 14, 15, 16, 17, 18, 19, 20, 22.5, 25, 27.5, 30, 32.5, 35, 37.5, 40, 42.5, 45, 47.5, 50, 52.5, 55, 57.5, 60, 62.5, 65, 67.5, 70, 72.5, 75, 77.5, 80, 82.5, 85, 87.5, 90, 92.5, 95, 97.5, 100, 102.5, 105, 107.5, 110, 112.5, 115, 117.5, 120, 122.5, 125, 127.5, 130, 132.5, 135, 137.5, 140, 142.5, 145, 147.5, 150, 152.5, 155, 157.5, 160, 162.5, 165, 167.5, 170, 172.5, 175, 177.5, 180, 182.5, 185, 187.5, 190, 192.5, 195, 197.5, 200, 202.5, 205, 207.5, 210, 212.5, 215, 217.5, 220, 222.5, 225, 227.5, 230, 232.5, 235, 237.5, 240, 242.5, 245, 247.5, or 250 mg.

[0015] In some embodiments, the disease or condition is Dravet Syndrome.

[0016] In some embodiments, the subject is characterized by having: (i) seizure onset prior to 12 months of age with recurrent focal motor or hemiconvulsive or generalized tonic-clonic seizures, which are often prolonged and triggered by hyperthermia; (ii) no past history of causal magnetic resonance imaging lesion; (iii) no other known etiology of any diseases or conditions except Dravet Syndrome; (iv) normal development at seizure onset; (v) a pathogenic variant, or variant of uncertain significance in an SCN1A gene; (vi) at least 2 prior treatments for epilepsy that either had lack of adequate seizure control; (vii) 4 or more convulsive seizures during the 28 days prior to administering, wherein the convulsive seizures is any one selected from Hemiclonic, Focal With Motor Signs, Focal To Bilateral Tonic Clonic Convulsion, Generalized Tonic Clonic Convulsion, Tonic, Tonic or Atonic (Drop Attacks), and Clonic; (viii) a current intervention for epilepsy or medication with at least one antiepileptic drug at a dose which has been stable for at least 4 weeks, wherein the interventions for epilepsy is a ketogenic diet, a vagal nerve stimulator, or a cannabinoid or marijuana-derived product; or (ix) any combination of (i)-(viii).

[0017] In some embodiments, the subject is additionally characterized by not having one or more of the following: (a) one of the following mutations in the SCN1A gene: Thr226Met, Leu263Val, Val422Leu, Thr1174Ser, Trp1204Arg, Pro1345Ser, Gln1489Lys, Phe1499Leu, Arg1575Cys, Val1611Phe, Leu1624Pro, Arg1648Cys, Leu1649Gln, Leu1670Trp, Gly1674Arg, and Asp1866Tyr; (b) a known pathogenic mutation in another gene that causes epilepsy, wherein the pathogenic mutation is homozygous in cases of known recessive disease; (c) currently treated with a sodium channel blocker as maintenance treatment and an anticoagulant, wherein the sodium channel blocker is phenytoin, carbamazepine, oxcarbazepine, lamotrigine, lacosamide, or rufinamide, and wherein the anticoagulant is not an aspirin; (d) clinically, significantly unstable medical conditions other than epilepsy; (e) clinically, relevant symptoms or a clinically significant illness in the 4 weeks prior to administering, other than epilepsy; (f) a history of brain or spinal cord disease other than epilepsy, Dravet Syndrome or a history of bacterial meningitis or brain malformation; (g) a spinal deformity or other condition that alters the free flow of cerebrospinal fluid (CSF) or having an implanted CSF drainage shunt; (h) clinically significant abnormal laboratory values prior to administering; (i) aspartate aminotransferase or alanine aminotransferase>2.5-fold upper limit of normal, serum creatinine greater than an upper limit of normal or platelet count less than a lower limit of normal; (j) clinically relevant abnormalities in the 12-lead electrocardiogram (ECG) measured at prior to administering; (k) a psychiatric or behavioral disorder; (l) currently or in the past 4 weeks, medication of an anticoagulant, wherein the anticoagulant is not aspirin; or (m) any combination of (a)-(l).

[0018] In some embodiments, the human subject is from 1 to 18, from 2 to 18, from 3 to 18, from 4 to 18, from 5 to 18, from 6 to 18, from 7 to 18, from 8 to 18, from 9 to 18, from 10 to 18, from 11 to 18, from 12 to 18, from 13 to 18, from 14 to 18, from 15 to 18, from 16 to 18, or from 17 to 18 years old.

[0019] In some embodiments, the human subject is a human from 1 to 17, from 1 to 16, from 1 to 15, from 1 to 14, from 1 to 13, from 1 to 12, from 1 to 11, from 1 to 10, from 1 to 9, from 1 to 8, from 1 to 7, from 1 to 6, from 1 to 5, from 1 to 4, from 1 to 3, or from 1 to 2 years old.

[0020] In some embodiments, the human subject is less than a year old or 1, 2, 3, 4, 5, 6, 7, 8, 9, 10, 11, 12, 13, 14, 15, 16, 17, or 18 years old.

[0021] In some embodiments, the pharmaceutical composition is administered into the intrathecal space of the human subject.

[0022] In some embodiments, the pharmaceutical composition is administered into the cerebrospinal fluid of the human subject.

[0023] In some embodiments, the pharmaceutical composition is administered into the brain of the human subject.

[0024] In some embodiments, the pharmaceutical composition is administered into the cerebrospinal fluid in the brain of the human subject.

[0025] In some embodiments, the pharmaceutical composition is administered as a bolus injection.

[0026] In some embodiments, the pharmaceutical composition is administered by infusion with a delivery pump.

[0027] In some embodiments, the pharmaceutical composition is administered by intracerebroventricular injection.

[0028] In some embodiments, the pharmaceutical composition is administered by intrathecal injection.

[0029] In some embodiments, the method reduces or ameliorates at least one symptom of Dravet Syndrome in the human subject.

[0030] In some embodiments, the symptom of Dravet Syndrome is a seizure.

[0031] In some embodiments, the administration reduces or ameliorates seizure frequency, seizure intensity, or seizure duration.

[0032] In some embodiments, the ASO comprises a sequence with at least 83%, 88%, 94% or 100% sequence identity to any one of SEQ ID NOs: 21-67, 210-256 or 304-1099.

[0033] In some embodiments, the ASO consists of a sequence with at least 83%, 88%, 94% or 100% sequence identity to any one of SEQ ID NOs: 21-67, 210-256 or 304-1099.

[0034] In some embodiments, the ASO comprises at least one modified sugar moiety.

[0035] In some embodiments, the ASO comprises T-methoxyethyl sugar moiety.

[0036] In some embodiments, the T-methoxyethyl sugar moiety is a T-2′-methoxyethyl sugar moiety.

[0037] In some embodiments, the ASO comprises a 2′-O-methoxyethyl moiety.

[0038] In some embodiments, the ASO comprises a thymidine comprising a 2′-O-methoxyethyl moiety.

[0039] In some embodiments, each nucleobase of the ASO comprises a 2′-O-methoxyethyl moiety.

[0040] In some embodiments, the ASO consists of from 8 to 50 nucleobases.

[0041] In some embodiments, the ASO consists of from 16 to 20 nucleobases.

[0042] In some embodiments, the ASO consists of from 12 to 20 nucleobases.

[0043] In some embodiments, the ASO consists of from 8 to 20 nucleobases.

[0044] In some embodiments, the ASO comprises a 5′-methylcytosine (5′-MeC).

[0045] In some embodiments, each cytosine of the ASO is a 5′-methylcytosine (5′-MeC).

[0046] In some embodiments, the ASO comprises a phosphorothioate linkage.

[0047] In some embodiments, each internucleoside linkage of the ASO is a phosphorothioate linkage.

[0048] In some embodiments, the ASO comprises a locked nucleic acid (LNA).

[0049] In some embodiments, the method further comprises assessing tolerability or effectiveness of the pharmaceutical composition.

[0050] In some embodiments, the method further comprises administering to the human subject a pharmaceutical composition comprising the ASO at subsequent doses of 0.1, 0.5, 1, 2.5, 5, 6, 7, 8, 9, 10, 11, 12, 13, 14, 15, 16, 17, 18, 19, 20, 22.5, 25, 27.5, 30, 32.5, 35, 37.5, 40, 42.5, 45, 47.5, 50, 52.5, 55, 57.5, 60, 62.5, 65, 67.5, 70, 72.5, 75, 77.5, 80, 82.5, 85, 87.5, 90, 92.5, 95, 97.5, 100, 102.5, 105, 107.5, 110, 112.5, 115, 117.5, 120, 122.5, 125, 127.5, 130, 132.5, 135, 137.5, 140, 142.5, 145, 147.5, 150, 152.5, 155, 157.5, 160, 162.5, 165, 167.5, 170, 172.5, 175, 177.5, 180, 182.5, 185, 187.5, 190, 192.5, 195, 197.5, 200, 202.5, 205, 207.5, 210, 212.5, 215, 217.5, 220, 222.5, 225, 227.5, 230, 232.5, 235, 237.5, 240, 242.5, 245, 247.5, or 250 mg.

[0051] In some embodiments, the subsequent dose is lower than the previous dose following an indication that administration of the previous dose is not tolerated.

[0052] In some embodiments, the subsequent dose is the same as the previous dose following an indication that administration of the previous dose is tolerated.

[0053] In some embodiments, the subsequent dose is higher than the previous dose following an indication that administration of the previous dose is tolerated.

[0054] In some embodiments, the subsequent dose is the same as the previous dose following an indication that administration of the previous dose is effective.

[0055] In some embodiments, the subsequent dose is lower than the previous dose following an indication that administration of the previous dose is effective.

[0056] In some embodiments, the subsequent dose is higher than the previous dose following an indication that administration of the previous dose is not effective.

[0057] In some embodiments, the subsequent doses are administered at least 1, 2, 3, 4, 5, 6, 7, 8, 9, 10, 11, or 12 months after administration of the previous dose.

[0058] In some embodiments, dose frequency is maintained or reduced following an indication that the previous dose is effective.

[0059] In some embodiments, dose frequency is increased following an indication that the previous dose is not effective.

[0060] In some embodiments, the method further comprises administrating at least one additional therapeutic agent or therapy.

[0061] In some embodiments, the at least one additional therapeutic agent or therapy is administered at the same time as the dose.

[0062] In some embodiments, the at least one additional therapeutic agent or therapy is administered prior to administration of the dose.

[0063] In some embodiments, the at least one additional therapeutic agent or therapy is administered after administration of the dose.

[0064] In some embodiments, the pharmaceutical composition comprises a pharmaceutically acceptable excipient, carrier or diluent.

[0065] In some embodiments, the pharmaceutical composition is a liquid composition.

[0066] In some embodiments, the pharmaceutical composition comprises from 0.1 mL to 50 mL of a diluent, wherein the ASO is solubilized or diluted in the diluent.

[0067] In some embodiments, the pharmaceutical composition comprises about 0.1, 0.5, 1, 2, 2.5, 3, 4, 5, 6, 7, 8, 9, 10, 11, 12, 13, 14, 15, 16, 17, 18, 19, 20, 25, 30, 35, 40, 45 or 50 mL of the diluent.

[0068] In some embodiments, the pharmaceutical composition comprises 1 mL to 20 mL of the diluent, 2 mL to 10 mL of the diluent or 1 mL to 5 mL of the diluent.

[0069] In some embodiments, the diluent comprises a cerebral spinal fluid (CSF) sample from the subject or an artificial cerebral spinal fluid (aCSF) solution.

[0070] In some embodiments, the method comprises obtaining a cerebral spinal fluid sample from the subject.

[0071] In some embodiments, the method comprises solubilizing or diluting the ASO in a CSF sample from the subject.

[0072] In some embodiments, the method comprises administering the pharmaceutical composition as a bolus injection.

[0073] In some embodiments, the method comprises administering the pharmaceutical composition as a bolus injection over 1 to 60 minutes, 1 to 50 minutes, 1 to 40 minutes, 1 to 30 minutes, 1 to 20 minutes, 1 to 10 minutes, 1 to 5 minutes, or 1 to 3 minutes.

[0074] In some embodiments, the method comprises administering the pharmaceutical composition as a bolus injection using a spinal anesthesia needle.

[0075] In some embodiments, the ASO is solubilized or diluted in an artificial cerebral spinal fluid (aCSF) solution.

[0076] In some embodiments, the solution comprises a cerebral spinal fluid (CSF) sample from the subject.

[0077] In some embodiments, the ASO is solubilized or diluted in an isotonic solution.

[0078] In some embodiments, the ASO is solubilized or diluted in a phosphate-buffered solution with at least pH 5.8.

[0079] In some embodiments, the ASO is solubilized or diluted in a phosphate-buffered (pH 6.6-7.6) solution.

[0080] In some embodiments, the ASO is solubilized or diluted in a buffer comprising 25-250 mM NaCl.

[0081] In some embodiments, the ASO is solubilized or diluted in a buffer comprising 0.1-20 mM KCl.

[0082] In some embodiments, the ASO is solubilized or diluted in a buffer comprising 0.1-50 mM Na₂HPO₄.

[0083] In some embodiments, the ASO is solubilized or diluted in a buffer comprising 0.1-50 mM NaH₂PO₄.

[0084] In some embodiments, the ASO is solubilized or diluted in a buffer comprising 0.1-50 mM CaCl₂.

[0085] In some embodiments, the ASO is solubilized or diluted in a buffer comprising 0.1-50 mM MgCl₂.

[0086] In some embodiments, the ASO is solubilized or diluted in a buffer comprising 25-250 mM NaCl, 0.1-20 mM KCl, 0.1-50 mM Na₂HPO₄, 0.1-50 mM NaH₂PO₄, 0.1-50 mM CaCl₂, and 0.1-50 mM MgCl₂.

[0087] In some embodiments, the ASO is solubilized or diluted in a buffer comprising 150 mM NaCl, 3.0 mM KCl, 0.7 mM Na₂HPO₄, 0.3 mM NaH₂PO₄, 0.79 mM MgCl₂, and 1.4 mM CaCl₂.

[0088] In some embodiments, the ASO is solubilized or diluted in a buffer further comprising carbohydrates.

[0089] In some embodiments, the carbohydrates comprise D-glucose. In some embodiments, the ASO is solubilized or diluted in a buffer further comprising 1-100 mM D-glucose.

[0090] In some embodiments, the ASO is solubilized or diluted in a buffer further comprising 1-100 mM NaHCO₃, 1-100 mM KHCO₃, or a combination thereof.

[0091] In some embodiments, the ASO is solubilized or diluted in a buffer further comprising an antioxidant.

[0092] In some embodiments, the antioxidant is t-butylhydroxyquinoline (TBHQ), buylated hydroxytolune (BHT), butylated hydroxyanisole (BHA), vitamin E, or any combination thereof.

[0093] In some embodiments, the pharmaceutical formulation does not comprise a preservative.

[0094] In some embodiments, the ASO is present in the pharmaceutical composition at a concentration of from 0.1 mg/mL to 250 mg/mL.

[0095] In some embodiments, the ASO is present in the pharmaceutical composition at a concentration of about 0.1 mg/mL, 0.5 mg/mL, 1 mg/mL, 2 mg/mL, 2.5 mg/mL, 3 mg/mL, 4 mg/mL, 5 mg/mL, 6 mg/mL, 7 mg/mL, 8 mg/mL, 9 mg/mL, 10 mg/mL, 11 mg/mL, 12 mg/mL, 13 mg/mL, 14 mg/mL, 15 mg/mL, 16 mg/mL, 17 mg/mL, 18 mg/mL, 19 mg/mL, or 20 mg/mL. In some embodiments, the ASO is present in the pharmaceutical composition at a concentration of about 30 mg/mL, 40 mg/mL, 50 mg/mL, 60 mg/mL, 70 mg/mL, 80 mg/mL, 90 mg/mL, 100 mg/mL, 110 mg/mL, 120 mg/mL, 130 mg/mL, 140 mg/mL, 150 mg/mL, 160 mg/mL, 170 mg/mL, 180 mg/mL, 190 mg/mL, or 200 mg/mL. In some embodiments, the ASO is present in the pharmaceutical composition at a concentration of about 22.5 mg/mL, 25 mg/mL, 27.5 mg/mL, 30 mg/mL, 32.5 mg/mL, 35 mg/mL, 37.5 mg/mL, 40 mg/mL, 42.5 mg/mL, 45 mg/mL, 47.5 mg/mL, 50 mg/mL, 52.5 mg/mL, 55 mg/mL, 57.5 mg/mL, 60 mg/mL, 62.5 mg/mL, 65 mg/mL, 67.5 mg/mL, 70 mg/mL, 72.5 mg/mL, 75 mg/mL, 77.5 mg/mL, 80 mg/mL, 82.5 mg/mL, 85 mg/mL, 87.5 mg/mL, 90 mg/mL, 92.5 mg/mL, 95 mg/mL, 97.5 mg/mL, 100 mg/mL, 102.5 mg/mL, 105 mg/mL, 107.5 mg/mL, 110 mg/mL, 112.5 mg/mL, 115 mg/mL, 117.5 mg/mL, 120 mg/mL, 122.5 mg/mL, 125 mg/mL, 127.5 mg/mL, 130 mg/mL, 132.5 mg/mL, 135 mg/mL, 137.5 mg/mL, 140 mg/mL, 142.5 mg/mL, 145 mg/mL, 147.5 mg/mL, 150 mg/mL, 152.5 mg/mL, 155 mg/mL, 157.5 mg/mL, 160 mg/mL, 162.5 mg/mL, 165 mg/mL, 167.5 mg/mL, 170 mg/mL, 172.5 mg/mL, 175 mg/mL, 177.5 mg/mL, 180 mg/mL, 182.5 mg/mL, 185 mg/mL, 187.5 mg/mL, 190 mg/mL, 192.5 mg/mL, 195 mg/mL, 197.5 mg/mL, 200 mg/mL, 202.5 mg/mL, 205 mg/mL, 207.5 mg/mL, 210 mg/mL, 212.5 mg/mL, 215 mg/mL, 217.5 mg/mL, 220 mg/mL, 222.5 mg/mL, 225 mg/mL, 227.5 mg/mL, 230 mg/mL, 232.5 mg/mL, 235 mg/mL, 237.5 mg/mL, 240 mg/mL, 242.5 mg/mL, 245 mg/mL, 247.5 mg/mL, or 250 mg/mL. In some embodiments, the ASO is present in the pharmaceutical composition at a concentration of 11 mg/mL, 22 mg/mL, 33 mg/mL, 44 mg/mL, 55 mg/mL, 66 mg/mL, 77 mg/mL, 88 mg/mL, 99 mg/mL, or 100 mg/mL.

[0096] In some embodiments, the reduced expression or function of Na_{V}1.1 protein is associated with an altered splicing of a non-sense mediated RNA decay-inducing exon (NMD exon) in a pre-mRNA that encodes Na_{V}1.1 protein and contains the NMD exon.

[0097] In some embodiments, the ASO promotes exclusion of the NMD exon from the pre-mRNA.

[0098] In some embodiments, the ASO binds to a targeted portion of a pre-mRNA that contains a non-sense mediated RNA decay-inducing exon (NMD exon) and that encodes Na_{V}1.1 protein.

[0099] In some embodiments, the ASO promotes exclusion of the NMD exon from the pre-mRNA that contains the NMD exon and that encodes Na_{V}1.1 protein.

[0100] In some embodiments, the ASO increases a level of processed mRNA encoding the Na_{V}1.1 protein when the ASO is introduced into the cell.

[0101] In some embodiments, the ASO increases a level of the Na_{V}1.1 protein when the ASO is introduced into the cell.

[0102] In some embodiments, the targeted portion is within an intron sequence flanking the NMD exon.

[0103] In some embodiments, the targeted portion comprises at least one nucleotide of the NMD exon.

[0104] In some embodiments, the targeted portion is within the NMD exon.

[0105] In some embodiments, the method treats the disease or condition.

[0106] In some aspects, provided herein is a pharmaceutical formulation comprising: (a) an antisense oligomer (ASO), wherein the ASO comprises a sequence with at least 80% sequence identity to any one of SEQ ID NOs: 21-67, 210-256 or 304-1099; and (b) a pharmaceutically acceptable diluent; wherein the ASO is dissolved or suspended in a solution at a concentration of from 0.1-200 mg/mL.

[0107] In some embodiments, the pharmaceutically acceptable diluent comprises an artificial cerebral spinal fluid (aCSF) solution.

[0108] In some embodiments, the solution comprises a cerebral spinal fluid (CSF) sample from the subject.

[0109] In some embodiments, the ASO is present in the pharmaceutical composition at a concentration of about 0.1 mg/mL, 0.5 mg/mL, 1 mg/mL, 2 mg/mL, 2.5 mg/mL, 3 mg/mL, 4 mg/mL, 5 mg/mL, 6 mg/mL, 7 mg/mL, 8 mg/mL, 9 mg/mL, 10 mg/mL, 11 mg/mL, 12 mg/mL, 13 mg/mL, 14 mg/mL, 15 mg/mL, 16 mg/mL, 17 mg/mL, 18 mg/mL, 19 mg/mL, or 20 mg/mL. In some embodiments, the ASO is present in the pharmaceutical composition at a concentration of about 22.5 mg/mL, 25 mg/mL, 27.5 mg/mL, 30 mg/mL, 32.5 mg/mL, 35 mg/mL, 37.5 mg/mL, 40 mg/mL, 42.5 mg/mL, 45 mg/mL, 47.5 mg/mL, 50 mg/mL, 52.5 mg/mL, 55 mg/mL, 57.5 mg/mL, 60 mg/mL, 62.5 mg/mL, 65 mg/mL, 67.5 mg/mL, 70 mg/mL, 72.5 mg/mL, 75 mg/mL, 77.5 mg/mL, 80 mg/mL, 82.5 mg/mL, 85 mg/mL, 87.5 mg/mL, 90 mg/mL, 92.5 mg/mL, 95 mg/mL, 97.5 mg/mL, 100 mg/mL, 102.5 mg/mL, 105 mg/mL, 107.5 mg/mL, 110 mg/mL, 112.5 mg/mL, 115 mg/mL, 117.5 mg/mL, 120 mg/mL, 122.5 mg/mL, 125 mg/mL, 127.5 mg/mL, 130 mg/mL, 132.5 mg/mL, 135 mg/mL, 137.5 mg/mL, 140 mg/mL, 142.5 mg/mL, 145 mg/mL, 147.5 mg/mL, 150 mg/mL, 152.5 mg/mL, 155 mg/mL, 157.5 mg/mL, 160 mg/mL, 162.5 mg/mL, 165 mg/mL, 167.5 mg/mL, 170 mg/mL, 172.5 mg/mL, 175 mg/mL, 177.5 mg/mL, 180 mg/mL, 182.5 mg/mL, 185 mg/mL, 187.5 mg/mL, 190 mg/mL, 192.5 mg/mL, 195 mg/mL, 197.5 mg/mL, 200 mg/mL, 202.5 mg/mL, 205 mg/mL, 207.5 mg/mL, 210 mg/mL, 212.5 mg/mL, 215 mg/mL, 217.5 mg/mL, 220 mg/mL, 222.5 mg/mL, 225 mg/mL, 227.5 mg/mL, 230 mg/mL, 232.5 mg/mL, 235 mg/mL, 237.5 mg/mL, 240 mg/mL, 242.5 mg/mL, 245 mg/mL, 247.5 mg/mL, or 250 mg/mL.

[0110] In some embodiments, the ASO is present in the pharmaceutical composition at a concentration of 11 mg/mL, 22 mg/mL, 33 mg/mL, 44 mg/mL, 55 mg/mL, 66 mg/mL, 77 mg/mL, 88 mg/mL, 99 mg/mL, or 100 mg/mL.

[0111] In some embodiments, the ASO is solubilized or diluted in an isotonic solution.

[0112] In some embodiments, the ASO is solubilized or diluted in a phosphate-buffered solution with at least pH 5.8.

[0113] In some embodiments, the ASO is solubilized or diluted in a phosphate-buffered (pH 6.6-7.6) solution.

[0114] In some embodiments, the ASO is solubilized or diluted in a buffer comprising 25-250 mM NaCl.

[0115] In some embodiments, the ASO is solubilized or diluted in a buffer comprising 0.1-20 mM KCl.

[0116] In some embodiments, the ASO is solubilized or diluted in a buffer comprising 0.1-50 mM Na₂HPO₄.

[0117] In some embodiments, the ASO is solubilized or diluted in a buffer comprising 0.1-50 mM NaH₂PO₄.

[0118] In some embodiments, the ASO is solubilized or diluted in a buffer comprising 0.1-50 mM CaCl₂.

[0119] In some embodiments, the ASO is solubilized or diluted in a buffer comprising 0.1-50 mM MgCl₂.

[0120] In some embodiments, the ASO is solubilized or diluted in a buffer comprising 25-250 mM NaCl, 0.1-20 mM KCl, 0.1-50 mM Na₂HPO₄, 0.1-50 mM NaH₂PO₄, 0.1-50 mM CaCl₂, and 0.1-50 mM MgCl₂.

[0121] In some embodiments, the ASO is solubilized or diluted in a buffer comprising 150 mM NaCl, 3.0 mM KCl, 0.7 mM Na₂HPO₄, 0.3 mM NaH₂PO₄, 0.79 mM MgCl₂, and 1.4 mM CaCl₂.

[0122] In some embodiments, the ASO is solubilized or diluted in a buffer further comprising carbohydrates.

[0123] In some embodiments, the carbohydrates comprise D-glucose. In some embodiments, the ASO is solubilized or diluted in a buffer further comprising 1-100 mM D-glucose.

[0124] In some embodiments, the ASO is solubilized or diluted in a buffer further comprising 1-100 mM NaHCO₃, 1-100 mM KHCO₃, or a combination thereof.

[0125] In some embodiments, the ASO is solubilized or diluted in a buffer further comprising an antioxidant.

[0126] In some embodiments, the antioxidant is t-butylhydroxyquinoline (TBHQ), buylated hydroxytolune (BHT), butylated hydroxyanisole (BHA), vitamin E, or any combination thereof.

[0127] In some embodiments, the pharmaceutical formulation does not comprise a preservative.

[0128] In some embodiments, the pharmaceutical formulation is suitable for an intracerebroventricular or intrathecal injection.

[0129] In some embodiments, the pharmaceutical formulation is packaged in a single use vial.

[0130] In some aspects, provided herein is a kit comprising: (i) an concentrate comprising an antisense oligomer (ASO), wherein the ASO comprises a sequence with at least 80% sequence identity to any one of SEQ ID NOs: 21-67, 210-256 or 304-1099; and (ii) a diluent, wherein the concentrate is miscible with the diluent; and (iii) instructions for diluting or solubilizing the ASO in the diluent.

[0131] In some embodiments, the diluent is an artificial cerebral spinal fluid (aCSF) solution.

[0132] In some embodiments, the diluent comprises an isotonic solution.

[0133] In some embodiments, the diluent comprises phosphate-buffered solution with at least pH 5.8.

[0134] In some embodiments, the diluent comprises a phosphate-buffered (pH 6.6-7.6) solution.

[0135] In some embodiments, the diluent comprises 25-250 mM NaCl.

[0136] In some embodiments, the diluent comprises 0.1-20 mM KCl.

[0137] In some embodiments, the diluent comprises 0.1-50 mM Na₂HPO₄.

[0138] In some embodiments, the diluent comprises 0.1-50 mM NaH₂PO₄.

[0139] In some embodiments, the diluent comprises 0.1-50 mM CaCl₂.

[0140] In some embodiments, the diluent comprises 0.1-50 mM MgCl₂.

[0141] In some embodiments, the diluent comprises 25-250 mM NaCl, 0.1-20 mM KCl, 0.1-50 mM Na₂HPO₄, 0.1-50 mM NaH₂PO₄, 0.1-50 mM CaCl₂, and 0.1-50 mM MgCl₂.

[0142] In some embodiments, the diluent comprises 150 mM NaCl, 3.0 mM KCl, 0.7 mM Na₂HPO₄, 0.3 mM NaH₂PO₄, 0.79 mM MgCl₂, and 1.4 mM CaCl₂.

[0143] In some embodiments, the diluent further comprises carbohydrates. In some embodiments, the carbohydrates comprise D-glucose. In some embodiments, the diluent further comprises 1-100 mM D-glucose.

[0144] In some embodiments, the diluent further comprises 1-100 mM NaHCO₃, 1-100 mM KHCO₃, or a combination thereof.

[0145] In some embodiments, the diluent further comprises an antioxidant. In some embodiments, the antioxidant is t-butylhydroxyquinoline (TBHQ), buylated hydroxytolune (BHT), butylated hydroxyanisole (BHA), vitamin E, or any combination thereof.

[0146] In some embodiments, the diluent does not comprise a preservative.

[0147] In some embodiments, the instructions for diluting or solubilizing the ASO in the diluent comprise instructions for diluting or solubilizing the ASO to a concentration of from 0.1 mg/mL to 250 mg/mL in the diluent.

[0148] In some embodiments, the instructions for diluting or solubilizing the ASO in the diluent comprise instructions for diluting or solubilizing the ASO to a concentration of about 0.1 mg/mL, 0.5 mg/mL, 1 mg/mL, 2 mg/mL, 2.5 mg/mL, 3 mg/mL, 4 mg/mL, 5 mg/mL, 6 mg/mL, 7 mg/mL, 8 mg/mL, 9 mg/mL, 10 mg/mL, 11 mg/mL, 12 mg/mL, 13 mg/mL, 14 mg/mL, 15 mg/mL, 16 mg/mL, 17 mg/mL, 18 mg/mL, 19 mg/mL, or 20 mg/mL in the diluent.

[0149] In some embodiments, the instructions for diluting or solubilizing the ASO in the diluent comprise instructions for diluting or solubilizing the ASO to a concentration of about 22.5 mg/mL, 25 mg/mL, 27.5 mg/mL, 30 mg/mL, 32.5 mg/mL, 35 mg/mL, 37.5 mg/mL, 40 mg/mL, 42.5 mg/mL, 45 mg/mL, 47.5 mg/mL, 50 mg/mL, 52.5 mg/mL, 55 mg/mL, 57.5 mg/mL, 60 mg/mL, 62.5 mg/mL, 65 mg/mL, 67.5 mg/mL, 70 mg/mL, 72.5 mg/mL, 75 mg/mL, 77.5 mg/mL, 80 mg/mL, 82.5 mg/mL, 85 mg/mL, 87.5 mg/mL, 90 mg/mL, 92.5 mg/mL, 95 mg/mL, 97.5 mg/mL, 100 mg/mL, 102.5 mg/mL, 105 mg/mL, 107.5 mg/mL, 110 mg/mL, 112.5 mg/mL, 115 mg/mL, 117.5 mg/mL, 120 mg/mL, 122.5 mg/mL, 125 mg/mL, 127.5 mg/mL, 130 mg/mL, 132.5 mg/mL, 135 mg/mL, 137.5 mg/mL, 140 mg/mL, 142.5 mg/mL, 145 mg/mL, 147.5 mg/mL, 150 mg/mL, 152.5 mg/mL, 155 mg/mL, 157.5 mg/mL, 160 mg/mL, 162.5 mg/mL, 165 mg/mL, 167.5 mg/mL, 170 mg/mL, 172.5 mg/mL, 175 mg/mL, 177.5 mg/mL, 180 mg/mL, 182.5 mg/mL, 185 mg/mL, 187.5 mg/mL, 190 mg/mL, 192.5 mg/mL, 195 mg/mL, 197.5 mg/mL, 200 mg/mL, 202.5 mg/mL, 205 mg/mL, 207.5 mg/mL, 210 mg/mL, 212.5 mg/mL, 215 mg/mL, 217.5 mg/mL, 220 mg/mL, 222.5 mg/mL, 225 mg/mL, 227.5 mg/mL, 230 mg/mL, 232.5 mg/mL, 235 mg/mL, 237.5 mg/mL, 240 mg/mL, 242.5 mg/mL, 245 mg/mL, 247.5 mg/mL, or 250 mg/mL in the diluent.

[0150] In some embodiments, the instructions for diluting or solubilizing the ASO in the diluent comprise instructions for diluting or solubilizing the ASO to a concentration of about 11 mg/mL, 22 mg/mL, 33 mg/mL, 44 mg/mL, 55 mg/mL, 66 mg/mL, 77 mg/mL, 88 mg/mL, 99 mg/mL, or 100 mg/mL in the diluent.

[0151] In some embodiments, the instructions for diluting or solubilizing the ASO in the diluent comprise instructions for diluting or solubilizing from about 0.5 milligrams to about 500 milligrams of the ASO in the diluent.

[0152] In some embodiments, the instructions for diluting or solubilizing the ASO in the diluent comprise instructions for diluting or solubilizing about 0.1, 0.5, 1, 2.5, 5, 6, 7, 8, 9, 10, 11, 12, 13, 14, 15, 16, 17, 18, 19, 20, 22.5, 25, 27.5, 30, 32.5, 35, 37.5, 40, 42.5, 45, 47.5, 50, 52.5, 55, 57.5, 60, 62.5, 65, 67.5, 70, 72.5, 75, 77.5, 80, 82.5, 85, 87.5, 90, 92.5, 95, 97.5, 100, 102.5, 105, 107.5, 110, 112.5, 115, 117.5, 120, 122.5, 125, 127.5, 130, 132.5, 135, 137.5, 140, 142.5, 145, 147.5, 150, 152.5, 155, 157.5, 160, 162.5, 165, 167.5, 170, 172.5, 175, 177.5, 180, 182.5, 185, 187.5, 190, 192.5, 195, 197.5, 200, 202.5, 205, 207.5, 210, 212.5, 215, 217.5, 220, 222.5, 225, 227.5, 230, 232.5, 235, 237.5, 240, 242.5, 245, 247.5, or 250 mg of the ASO in the diluent.

[0153] In some aspects, provided herein is a use of an antisense oligomer (ASO) for the manufacture of a medicament for treating or preventing a disease or condition characterized by a reduced expression or function of NaV1.1 protein in a human subject in need thereof, wherein the medicament is administered at a first dose of from about 0.5 milligrams to about 500 milligrams, and wherein the ASO comprises a sequence with at least 80% sequence identity to any one of SEQ ID NOs: 21-67, 210-256 or 304-1099. In some embodiments, the medicament is administered at a first dose of about 0.1, 0.5, 1, 2.5, 5, 6, 7, 8, 9, 10, 11, 12, 13, 14, 15, 16, 17, 18, 19, 20, 22.5, 25, 27.5, 30, 32.5, 35, 37.5, 40, 42.5, 45, 47.5, 50, 52.5, 55, 57.5, 60, 62.5, 65, 67.5, 70, 72.5, 75, 77.5, 80, 82.5, 85, 87.5, 90, 92.5, 95, 97.5, 100, 102.5, 105, 107.5, 110, 112.5, 115, 117.5, 120, 122.5, 125, 127.5, 130, 132.5, 135, 137.5, 140, 142.5, 145, 147.5, 150, 152.5, 155, 157.5, 160, 162.5, 165, 167.5, 170, 172.5, 175, 177.5, 180, 182.5, 185, 187.5, 190, 192.5, 195, 197.5, 200, 202.5, 205, 207.5, 210, 212.5, 215, 217.5, 220, 222.5, 225, 227.5, 230, 232.5, 235, 237.5, 240, 242.5, 245, 247.5, or 250 mg.

### INCORPORATION BY REFERENCE

[0154] All publications, patents, and patent applications mentioned in this specification are herein incorporated by reference to the same extent as if each individual publication, patent, or patent application is specifically and individually indicated to be incorporated by reference.

### BRIEF DESCRIPTION OF THE DRAWINGS

[0155] The features of the present disclosure are set forth with particularity in the appended claims. A better understanding of the features and advantages of the present disclosure will be obtained by reference to the following detailed description that sets forth illustrative embodiments, in which the principles of the disclosure are utilized, and the accompanying drawings of which:

[0156] FIGS. 1A-1B depict a schematic representation of a target pre-mRNA that contains a non-sense mediated RNA decay-inducing exon (NMD exon mRNA) and therapeutic agent-mediated exclusion of the nonsense-mediated mRNA decay-inducing exon from the pre-mRNA to increase expression of the full-length target protein or functional RNA. FIG. 1A shows a cell divided into nuclear and cytoplasmic compartments. In the nucleus, a pre-mRNA transcript of a target gene undergoes splicing to generate processed mRNA, and this processed mRNA is exported to the cytoplasm and translated into target protein. For this target gene, some fraction of the processed mRNA contains a nonsense-mediated mRNA decay-inducing exon (NMD exon mRNA) that is degraded in the cytoplasm, thus leading to no target protein production. FIG. 1B shows an example of the same cell divided into nuclear and cytoplasmic compartments. Treatment with a therapeutic agent, such as an antisense oligomer (ASO), promotes the exclusion of the nonsense-mediated mRNA decay-inducing exon from the pre-mRNA and results in an increase in processed mRNA, which is in turn translated into higher levels of target protein.

[0157] FIG. 1C is a schematic representation of therapeutic ASO-mediated exclusion of a nonsense-mediated mRNA decay-inducing exon from a pre-mRNA, which decreases non-productive processed mRNA (e.g., with an NMD exon) and increases productive mRNA (e.g., without an NMD exon) and increases expression of the full-length target protein from the productive mRNA.

[0158] FIG. 1D shows identification of an exemplary sequence in the SCN1A gene that encodes a nonsense-mediated mRNA decay (NMD)-inducing exon. The identification of the sequence in the SCN1A gene that encodes the NMD-inducing exon using comparative genomics is shown, visualized in the UCSC genome browser. The upper panel shows a graphic representation of the SCN1A gene to scale. The conservation level across 100 vertebrate species is shown as peaks. The highest peaks correspond to exons (black boxes), while no peaks are observed for the majority of the introns (lines with arrow heads). Peaks of conservation were identified in intron 20 (NM 006920), shown in the middle panel. Inspection of the conserved sequences identified an exon-like sequence of 64 bp (bottom panel, sequence highlighted in grey) flanked by 3′ and 5′ splice sites (underlined sequence). Inclusion of this exon leads to a frameshift and the introduction of a premature termination codon in exon 21 rendering the transcript a target of NMD. FIG. 1D discloses SEQ ID NO: 1100.

[0159] FIG. 2 shows a study design timeline for monitoring wild type (WT) and Dravet Syndrome (DS) mice as well as a Kaplan-Meier curve showing DS and WT littermate mice monitored to 14 weeks for survival.

[0160] FIG. 3 shows an experimental design for the EEG seizure monitoring study in DS mice and their WT littermates.

[0161] FIGS. 4A-4E show the results of monitoring seizure in mice administered with ASO-22 or PBS. FIG. 4A shows exemplary ECG recordings in DS mice. FIG. 4B shows the number of seizures occurring in various regions of the brain in the two mice groups. *Indicates p<0.05. FIG. 4C summarizes total number of spontaneous seizures (generalized and focal) recorded between P22 and P46 in DS mice dosed with PBS (n=21) or ASO-22 (n=21). *Indicates p<0.05. FIG. 4D shows the number of mice that had a number of seizures in each group. FIG. 4E shows effect of ASO-22 on the latency to the first recorded seizure between P22 and P46 in DS mice dosed with PBS (n=21) or ASO-22 (n=21).

[0162] FIGS. 5A-5G show that a single ICV injection of 20 μg ASO-22 at P2 results in reduced SUDEP incidence and increased Na_{V}1.1 protein expression in DS mice. FIG. 5A is a schematic for the experimental design. FIGS. 5B, 5C, 5D, 5E, 5F, and 5G illustrate the ASO-22 exposure, Scn1a expression, and Na_{V}1.1 expression in brain tissues at 7 weeks or 14 weeks after a single ICV injection of ASO-22 (20 μg) or PBS on P2, respectively.

[0163] FIGS. 6A-6B show the percent survival of DS and WT mice after a single ICV injection of ASO-22 (60 g) or PBS on P14.

[0164] FIGS. 7A-7F show the ASO-22 exposure, Scn1a expression, and Na_{V}1.1 expression in brain tissues at P35 and P90 after a single ICV injection of ASO-22 (60 μg) or PBS on P14, respectively.

[0165] FIG. 8 shows the experimental conditions and numbers of monkeys used per group.

[0166] FIGS. 9A-9B show the levels of ASO-22 in the cynomolgus monkey brain on study day 3 and 29.

[0167] FIGS. 10A-10B show the levels of Na_{V}1.1 protein in cynomolgus monkey brain regions on Day 3 and Day 29.

[0168] FIGS. 11A-11B show the percentages of productive SCN1A gene to total SCN1A gene as an evaluation of target engagement in cynomolgus monkeys on day 3 and day 29.

[0169] FIG. 12A shows the Plasma pharmacokinetics in cynomolgus monkey after Intrathecal Administration of ASO-22. FIG. 12B shows the levels of ASO-22 in the cynomolgus monkey cerebrospinal fluid (CSF) on study day 3 and 29.

[0170] FIGS. 13A-13D depict identification of an alternative splicing event in SCN1A that results in NMD.

[0171] FIG. 13A shows SCN1A splicing isoforms with or without inclusion of the alternative exon in ReNcells as demonstrated by RT-PCR. FIG. 13B shows evaluation of the alternative splice event of the SCN1A gene in cerebral cortex from 4 species. FIG. 13C shows TBE PAGE of RT-PCR products corresponding to Scn1a productive (lower bands, 498 bp) and non-productive transcript (upper bands, 562 bp) amplified from total RNA extracted from WT C57BL/6J mouse brains from P0 to P20 and at 10 months. Mouse Gapdh was used as a loading control. FIG. 13D summarizes expression of Scn1a productive and non-productive transcript in postnatal mouse brains, calculated with optical densities of PCR products shown in FIG. 13C.

[0172] FIGS. 14A-14E depict that selected ASOs suppressed the NMD splicing event and increased the expression of productive Scn1a mRNA in ReNcells.

[0173] FIGS. 15A-15C shows dose-dependent effects of ASO-22 on splicing and expression of Scn1a mRNA in ReNcells.

[0174] FIGS. 16A-16H depict ASO-22 ICV injection causes dose-dependent and durable increases in Scn1a mRNA and Na_{V}1.1 protein expression in mouse brain.

[0175] FIG. 17 shows dose-dependent effects of ASO-22 on expression of Scn1a mRNA in ICV-injected neonatal mouse brains.

[0176] FIG. 18 shows dose-dependent effects of ASO-22 on expression of Na_{V}1.1 in ICV-injected neonatal mouse brains.

[0177] FIG. 19 shows expression of Scn1a mRNA in mouse brains at different post-injection days.

[0178] FIG. 20 shows expression of Na_{V}1.1 in mouse brains at different post-injection days.

[0179] FIG. 21 shows validation of the two anti-Na_{V}1.1 antibodies used in the Examples. Specificity of the two anti-Na_{V}1.1 antibodies, Alomone ASC-001 and NeuroMab 75-023, was tested using total protein prepared from a Scn1a^{-/-} mouse brain (middle lane) and brains of two WT littermates (left and right lanes).

[0180] FIG. 22 shows a schematic representation of clinical manifestations of Dravet Syndrome and their relative incidences according to age. AA: atypical absences; AE: acute encephalopathy; CG: crouching gait; CPS: complex partial seizures; DD: developmental delay; DS: Dravet syndrome; EEG: electroencephalogram; FSz: complex febrile seizures; GMS: generalized motor seizures; HS: hyperthermia sensitivity; m: month; MSz: myoclonic seizures; OS: obtundation status; SE: status epilepticus; SUDEP: sudden unexpected death in epilepsy; y: years; * Moderate fever for 60%, mostly clonic generalized and unilateral motor seizures; **Difficult to distinguish between AA and CPS without ictal EEG recording, so their precise incidence is unknown. See, e.g., Gataullina and Dulac, 2017, of which entire content is incorporated herein by reference.

[0181] FIG. 23 shows TANGO (Targeted Augmentation of Nuclear Gene Output) that may be used to treat Dravet syndrome.

[0182] FIG. 24 shows transformative potential of TANGO technology in Dravet syndrome.

[0183] FIG. 25 shows methods: study design. Phase 1/2a open-label, 2-part study conducted at approximately 20 sites in the United States.

[0184] FIG. 26 shows a schematic representation of study design.

[0185] FIG. 27 shows methods: patients.

[0186] FIG. 28 shows study assessments.

### DETAILED DESCRIPTION

[0187] Certain specific details of this description are set forth in order to provide a thorough understanding of various embodiments. However, one skilled in the art will understand that the present disclosure may be practiced without these details. In other instances, well-known structures have not been shown or described in detail to avoid unnecessarily obscuring descriptions of the embodiments.

[0188] Unless otherwise defined, all technical and scientific terms used herein have the same meaning as commonly understood by one of ordinary skill in the art to which this disclosure belongs. Although methods and materials similar or equivalent to those described herein can be used in the practice or testing of the present disclosure, suitable methods, and materials are described below.

### Definitions

[0189] As used in this specification and the appended claims, the singular forms “a,” “an,” and “the” include plural referents unless the content clearly dictates otherwise.

[0190] It should be noted that the term “or” is generally employed in its sense including “and/or” unless the content clearly dictates otherwise. The terms “and/or” and “any combination thereof” and their grammatical equivalents as used herein, can be used interchangeably. These terms can convey that any combination is specifically contemplated. Solely for illustrative purposes, the following phrases “A, B, and/or C” or “A, B, C, or any combination thereof” can mean “A individually; B individually; C individually; A and B; B and C; A and C; and A, B, and C.” The term “or” can be used conjunctively or disjunctively, unless the context specifically refers to a disjunctive use.

[0191] The term “about” or “approximately” can mean within an acceptable error range for the particular value as determined by one of ordinary skill in the art, which will depend in part on how the value is measured or determined, i.e., the limitations of the measurement system. For example, “about” can mean within 1 or more than 1 standard deviation, per the practice in the art. Alternatively, “about” can mean a range of up to 20%, up to 10%, up to 5%, or up to 1% of a given value. Alternatively, particularly with respect to biological systems or processes, the term can mean within an order of magnitude, within 5-fold, and more preferably within 2-fold, of a value. Where particular values are described in the application and claims, unless otherwise stated, the term “about” meaning within an acceptable error range for the particular value should be assumed.

[0192] As used in this specification and claim(s), the words “comprising” (and any form of comprising, such as “comprise” and “comprises”), “having” (and any form of having, such as “have” and “has”), “including” (and any form of including, such as “includes” and “include”) or “containing” (and any form of containing, such as “contains” and “contain”) are inclusive or open-ended and do not exclude additional, unrecited elements or method steps. It is contemplated that any embodiment discussed in this specification can be implemented with respect to any method or composition of the present disclosure, and vice versa. Furthermore, compositions of the present disclosure can be used to achieve methods of the present disclosure.

[0193] Reference in the specification to “embodiments,” “some embodiments,” “an embodiment,” “one embodiment” “certain embodiments” or “other embodiments” means that a particular feature, structure, or characteristic described in connection with the embodiments is included in at least some embodiments, but not necessarily all embodiments, of the present disclosures. To facilitate an understanding of the present disclosure, a number of terms and phrases are defined below.

[0194] The terms “oligonucleotide sequence,” “nucleic acid sequence,” “polynucleic acid sequence,” “nucleotide sequence,” and “nucleotide acid sequence” are used herein interchangeably in its broadest sense and have the identical meaning herein and refer to preferably DNA or RNA. A nucleic acid sequence is a polymer comprising or consisting of nucleotide monomers, which are covalently linked to each other by phosphodiester-bonds of a sugar/phosphate-backbone. The term “nucleic acid sequence” also encompasses modified nucleic acid sequences, such as base-modified, sugar-modified or backbone-modified etc., DNA or RNA

[0195] The term “fragment,” or “fragment of a sequence” which have the identical meaning herein is a shorter portion of a full-length sequence of e.g., a nucleic acid molecule like DNA or RNA or a protein. Accordingly, a fragment, typically, consists of a sequence that is identical to the corresponding stretch within the full-length sequence. A preferred fragment of a sequence in the context of the present invention consists of a continuous stretch of entities, such as nucleotides or amino acids corresponding to a continuous stretch of entities in the molecule the fragment is derived from, which represents at least 1%, at least 2%, at least 3%, at least 4%, at least 5%, at least 6%, at least 7%, at least 8%, at least 9%, at least 10%, at least 15%, at least 20%, at least 25%, at least 30%, at least 35%, at least 40%, at least 45%, at least 50%, at least 55%, at least 60%, at least 65%, at least 70%, at least 75%, at least 80%, at least 85%, at least 90%, at least 95%, at least 97%, at least 98%, at least 99%, at least 99.5%, or even 100% of the total (i.e., full-length) molecule from which the fragment is derived. For example, a “fragment” or “functional fragment” of a polynucleotide or a polypeptide is a fragment of the polynucleotide or the polypeptide that is shorter than the full-length, immature, or mature nucleotide or polypeptide and has at least 1%, at least 2%, at least 3%, at least 4%, at least 5%, at least 6%, at least 7%, at least 8%, at least 9%, at least 10%, at least 15%, at least 20%, at least 25%, at least 30%, at least 35%, at least 40%, at least 45%, at least 50%, at least 55%, at least 60%, at least 65%, at least 70%, at least 75%, at least 80%, at least 85%, at least 90%, at least 95%, at least 97%, at least 98%, at least 99%, at least 99.5%, or even 100% or more of the activity of the full-length mature reference polynucleotide or polypeptide. Fragments of interest can be made by recombinant, synthetic, or digestive methods.

[0196] The term “recombinant” when used with reference, for example, to a cell, a nucleic acid, a protein, or a vector, indicates that the cell, nucleic acid, protein or vector has been modified by or is the result of laboratory methods. Thus, for example, the term “recombinant polynucleotide” can refer to a polynucleotide that is not naturally occurring and are synthesized or manipulated in vitro, such as polynucleotides produced by laboratory methods. A recombinant polynucleotide can be synthesized in a laboratory and/or can be prepared by using recombinant DNA technology by using enzymatic modification of DNA, such as enzymatic restriction digestion, ligation, and cloning. A recombinant polypeptide can be prepared by in vitro transcription of a recombinant DNA followed by in vitro translation of the produced messenger RNA (mRNA). Alternatively, under suitable conditions, a recombinant polynucleic acid or RNA can be incorporated into a cell and a recombinant polypeptide can be expressed within the cell. Recombinant proteins can include amino acid residues not found within the native (non-recombinant) form of the protein or can be include amino acid residues that have been modified, e.g., labeled.

[0197] The term “isolated” means separated from constituents, cellular and otherwise, in which the polynucleotide, polypeptide, protein, or fragments thereof, are normally associated with in nature. For example, with respect to a polynucleotide, an isolated polynucleotide is one that is separated from the 5′ and 3′ ends with which it is normally associated in the naturally occurring sequence. As is apparent to those of skill in the art, a non-naturally occurring polynucleotide, polypeptide, protein, or fragments thereof, does not require “isolation” to distinguish it from its naturally occurring counterpart. In addition, a “concentrated”, “separated” or “diluted” polynucleotide, polypeptide, protein, or fragments thereof, is distinguishable from its naturally occurring counterpart in that the concentration or number of molecules per volume is greater than “concentrated” or less than “separated” or “diluted” than that of its naturally occurring counterpart.

[0198] The terms “identical” or percent “identity,” in the context of two or more nucleic acids or polypeptide sequences, refer to two or more sequences or subsequences that are the same or have a specified percentage of nucleotides or amino acid residues that are the same (i.e., 30%, 35%, 40%, 45%, 50%, 55%, 60%, 65%, 70%, 75%, 80%, 85%, 90%, 95%, 98%, 99%, 99.5%, 99.8%, 99.9%, or 100% identity over a specified region, e.g., of the entire polypeptide sequences of the invention or individual domains of the polypeptides of the invention), when compared and aligned for maximum correspondence over a comparison window, or designated region as measured using a sequence comparison algorithm or by manual alignment and visual inspection. Such sequences that are at least about 80% identical are said to be “substantially identical.” In some embodiments, two sequences are 100% identical. In some embodiments, two sequences are 100% identical over the entire length of one of the sequences (e.g., the shorter of the two sequences where the sequences have different lengths). In various embodiments, identity may refer to the complement of a test sequence.

[0199] In some embodiments, the identity exists over a region that is at least about 2 to about 400 amino acids or nucleotides in length. In some embodiments, the identity exists over a region that is at least about 2 to about 390, at least about 2 to about 380, at least about 2 to about 370, at least about 2 to about 360, at least about 2 to about 350, at least about 2 to about 340, at least about 2 to about 330, at least about 2 to about 320, at least about 2 to about 310, at least about 2 to about 300, at least about 2 to about 290, at least about 2 to about 280, at least about 2 to about 270, at least about 2 to about 260, at least about 2 to about 250, at least about 2 to about 200, at least about 2 to about 150, at least about 2 to about 100 amino acids or nucleotides in length. In some embodiments, the identity exists over a region that is at least about 2 to about 90, at least about 2 to about 85, at least about 2 to about 80, at least about 2 to about 75, at least about 2 to about 70, at least about 2 to about 65, at least about 2 to about 60, at least about 2 to about 55, at least about 2 to about 50, at least about 2 to about 45, at least about 2 to about 40, at least about 2 to about 35, at least about 2 to about 30, at least about 2 to about 25, at least about 2 to about 20, at least about 2 to about 10, at least about 2 to about 5 amino acids or nucleotides in length.

[0200] In some embodiments, the identity exists over a region that is at least about 3 to about 400, about 4 to about 400, about 5 to about 400, about 6 to about 400, about 7 to about 400, about 8 to about 400, about 9 to about 400, about 10 to about 400, about 11 to about 400, about 12 to about 400, about 13 to about 400, about 14 to about 400, about 15 to about 400, about 16 to about 400, about 17 to about 400, about 18 to about 400, about 19 to about 400, about 20 to about 400, about 21 to about 400, about 22 to about 400, about 23 to about 400, about 24 to about 400, about 25 to about 400, about 26 to about 400, about 27 to about 400, about 28 to about 400, about 29 to about 400, about 30 to about 400, about 31 to about 400, about 32 to about 400, about 33 to about 400, about 34 to about 400, about 35 to about 400 amino acids or nucleotides in length. In some embodiments, the identity exists over a region that is at least about 40 to about 400, about 45 to about 400, about 50 to about 400, about 55 to about 400, about 60 to about 400, about 61 to about 400, about 62 to about 400, about 63 to about 400, about 64 to about 400, about 65 to about 400, about 66 to about 400, about 67 to about 400, about 68 to about 400, about 69 to about 400, about 70, to about 400, about 71 to about 400, about 72 to about 400, about 73 to about 400, about 74 to about 400, about 75 to about 400, about 80 to about 400, about 85 to about 400, about 90 to about 400, about 100 to about 400, about 150 to about 400, about 200 to about 400, about 250 to about 400, about 300 to about 400, about 350 to about 400 amino acids or nucleotides in length.

[0201] In some embodiments, the identity exists over a region that is at least about 2 to about 343, about 3 to about 343, about 4 to about 343, about 7 to about 343, about 9 to about 343, about 11 to about 343, about 15 to about 343, about 16 to about 343, about 20 to about 343, about 25 to about 343, about 62 to about 343, about 2 to about 317, about 3 to about 317, about 4 to about 317, about 7 to about 317, about 9 to about 317, about 11 to about 317, about 15 to about 317, about 16 to about 317, about 20 to about 317, about 25 to about 317, about 62 to about 317, about 2 to about 300, about 3 to about 300, about 4 to about 300, about 7 to about 300, about 9 to about 300, about 11 to about 300, about 15 to about 300, about 16 to about 300, about 20 to about 300, about 25 to about 300, about 62 to about 300, about 2 to about 62, about 3 to about 62, about 4 to about 62, about 7 to about 62, about 9 to about 62, about 11 to about 62, about 15 to about 62, about 16 to about 62, about 20 to about 62, about 25 to about 62 amino acids or nucleotides in length.

[0202] The term “genetically modified” means containing and/or expressing a foreign gene or nucleic acid sequence which in turn, modifies the genotype or phenotype of the cell or its progeny. In other words, it refers to any addition, deletion or disruption to a cell's endogenous nucleotides.

[0203] The term “operably linked” can refer to a functional relationship between two or more nucleic acid sequences, e.g., a functional relationship of a transcriptional regulatory or signal sequence to a transcribed sequence. For example, a target motif or a nucleic acid encoding a target motif is operably linked to a coding sequence if it is expressed as a preprotein that participates in targeting the polypeptide encoded by the coding sequence to a cell membrane, intracellular, or an extracellular compartment. For example, a signal peptide or a nucleic acid encoding a signal peptide is operably linked to a coding sequence if it is expressed as a preprotein that participates in the secretion of the polypeptide encoded by the coding sequence. For example, a promoter is operably linked if it stimulates or modulates the transcription of the coding sequence.

[0204] The term “subject” or “patient” encompasses vertebrates or mammals. Examples of mammals include, but are not limited to, any member of the mammalian class: humans, non-human primates such as chimpanzees, and other apes and monkey species; farm animals such as cattle, horses, sheep, goats, swine; domestic animals such as rabbits, dogs, and cats; laboratory animals including rodents, such as rats, mice and guinea pigs, and the like. In one aspect, the mammal is a human. The term “animal” as used herein comprises human beings and non-human animals. In one embodiment, a “non-human animal” is a mammal, for example, a rodent such as rat or a mouse. In one embodiment, a non-human animal is a mouse.

[0205] A “control” is an alternative subject or sample used in an experiment for comparison purpose. A control can be “positive” or “negative.”

### Methods of Treatment

[0206] In some aspects, provided herein is a method of treating or preventing a disease or condition characterized by a reduced expression or function of Na_{V}1.1 protein in a human subject in need thereof comprising administering to the human subject a pharmaceutical composition comprising an antisense oligomer (ASO) at a first dose of about 0.1, 0.5, 1, 2.5, 5, 6, 7, 8, 9, 10, 11, 12, 13, 14, 15, 16, 17, 18, 19, 20, 25, 30, 35, 40, 45, 50, 55, 60, 65, 70, 75, 80, 85, 90, 95, 100, 105, 110, 115, 120, 125, 130, 135, 140, 145, 150, 155, 160, 165, 170, 175, 180, 185, 190, 195, or 200 mg, wherein the ASO comprises a sequence with at least 80% sequence identity to any one of SEQ ID NOs: 21-67, 210-256 or 304-1099, thereby treating or preventing the disease or condition in the human subject. In some embodiments, the ASO comprises a sequence with at least 80% sequence identity to any one of the sequences listed in Tables 4a, 4b, 5a, 5b, 6a, 6b, 7, 8a, and 8b, thereby treating or preventing the disease or condition in the human subject.

[0207] In some aspects, provided herein is a method of treating or preventing a disease or condition characterized by a reduced expression or function of Na_{V}1.1 protein in a human subject in need thereof comprising administering to the human subject a pharmaceutical composition comprising a first dose of an antisense oligomer (ASO), wherein the ASO comprises a sequence with at least 80% sequence identity to any one of SEQ ID NOs: 21-67, 210-256 or 304-1099, thereby treating or preventing the disease or condition in the human subject; wherein the human subject is at most 18 years old. In some embodiments, the ASO comprises a sequence with at least 80% sequence identity to any one of the sequences listed in listed in Tables 4a, 4b, 5a, 5b, 6a, 6b, 7, 8a, and 8b, thereby treating or preventing the disease or condition in the human subject; wherein the human subject is at most 18 years old.

[0208] In some aspects, provided herein is a method of treating or preventing a disease or condition characterized by a reduced expression or function of Na_{V}1.1 protein in a human subject in need thereof comprising administering to the human subject a pharmaceutical composition comprising a single dose of an antisense oligomer (ASO), wherein the ASO comprises a sequence with at least 80% sequence identity to any one of SEQ ID NOs: 21-67, 210-256 or 304-1099, thereby treating or preventing the disease or condition in the human subject. In some embodiments, the ASO comprises a sequence with at least 80% sequence identity to any one of any one of the sequences listed in listed in Tables 4a, 4b, 5a, 5b, 6a, 6b, 7, 8a, and 8b, thereby treating or preventing the disease or condition in the human subject.

[0209] In some embodiments, the pharmaceutical composition is administered into the intrathecal space of the human subject. In some embodiments, the pharmaceutical composition is administered into the cerebrospinal fluid of the human subject. In some embodiments, the pharmaceutical composition is administered into the brain of the human subject. In some embodiments, the pharmaceutical composition is administered into the cerebrospinal fluid in the brain of the human subject.

[0210] In some embodiments, the pharmaceutical composition is administered as a bolus injection. In some embodiments, the pharmaceutical composition is administered by infusion with a delivery pump. In some embodiments, the pharmaceutical composition is administered by intracerebroventricular injection. In some embodiments, the pharmaceutical composition is administered by intrathecal injection.

### Therapeutic Dose

[0211] In some embodiments, the first dose is a single dose. In some embodiments, the method further comprises assessing tolerability or effectiveness of the pharmaceutical composition.

[0212] In some embodiments, the method as described herein comprises administering to the human subject a pharmaceutical composition comprising an ASO as described herein at a first dose of about 0.1, 0.5, 1, 2.5, 5, 6, 7, 8, 9, 10, 11, 12, 13, 14, 15, 16, 17, 18, 19, 20, 25, 30, 35, 40, 45, 50, 55, 60, 65, 70, 75, 80, 85, 90, 95, 100, 105, 110, 115, 120, 125, 130, 135, 140, 145, 150, 155, 160, 165, 170, 175, 180, 185, 190, 195, or 200 mg.

[0213] In some embodiments, the method as described herein comprises administering to the human subject a pharmaceutical composition comprising the ASO as described herein at a first dose of from about 0.1 to about 1000 mg, from about 0.2 to about 1000 mg, from about 0.3 to about 1000 mg, from about 0.4 to about 1000 mg, from about 0.5 to about 1000 mg, from about 0.6 to about 1000 mg, from about 0.7 to about 1000 mg, from about 0.8 to about 1000 mg, from about 0.9 to about 1000 mg, 1 to about 1000 mg, from about 2 to about 1000 mg, from about 3 to about 1000 mg, from about 4 to about 1000 mg, from about 5 to about 1000 mg, from about 6 to about 1000 mg, from about 7 to about 1000 mg, from about 8 to about 1000 mg, from about 9 to about 1000 mg, from about 10 to about 1000 mg, from about 15 to about 1000 mg, from about 20 to about 1000 mg, from about 25 to about 1000 mg, from about 30 to about 1000 mg, from about 35 to about 1000 mg, from about 40 to about 1000 mg, from about 45 to about 1000 mg, from about 50 to about 1000 mg, from about 55 to about 1000 mg, from about 60 to about 1000 mg, from about 65 to about 1000 mg, from about 70 to about 1000 mg, from about 75 to about 1000 mg, from about 80 to about 1000 mg, from about 85 to about 1000 mg, from about 90 to about 1000 mg, from about 95 to about 1000 mg, from about 100 to about 1000 mg, from about 150 to about 1000 mg, from about 200 to about 1000 mg, from about 250 to about 1000 mg, from about 300 to about 1000 mg, from about 350 to about 1000 mg, from about 400 to about 1000 mg, from about 450 to about 1000 mg, from about 500 to about 1000 mg, from about 550 to about 1000 mg, from about 600 to about 1000 mg, from about 650 to about 1000 mg, from about 700 to about 1000 mg, from about 750 to about 1000 mg, from about 800 to about 1000 mg, from about 850 to about 1000 mg, from about 900 to about 1000 mg, or from about 950 to about 1000 mg.

[0214] In some embodiments, the method as described herein comprises administering to the human subject a pharmaceutical composition comprising the ASO as described herein at a first dose of from 0.1 to 1000 mg, from 0.2 to 1000 mg, from 0.3 to 1000 mg, from 0.4 to 1000 mg, from 0.5 to 1000 mg, from 0.6 to 1000 mg, from 0.7 to 1000 mg, from 0.8 to 1000 mg, from 0.9 to 1000 mg, 1 to 1000 mg, from 2 to 1000 mg, from 3 to 1000 mg, from 4 to 1000 mg, from 5 to 1000 mg, from 6 to 1000 mg, from 7 to 1000 mg, from 8 to 1000 mg, from 9 to 1000 mg, from 10 to 1000 mg, from 15 to 1000 mg, from 20 to 1000 mg, from 25 to 1000 mg, from 30 to 1000 mg, from 35 to 1000 mg, from 40 to 1000 mg, from 45 to 1000 mg, from 50 to 1000 mg, from 55 to 1000 mg, from 60 to 1000 mg, from 65 to 1000 mg, from 70 to 1000 mg, from 75 to 1000 mg, from 80 to 1000 mg, from 85 to 1000 mg, from 90 to 1000 mg, from 95 to 1000 mg, from 100 to 1000 mg, from 150 to 1000 mg, from 200 to 1000 mg, from 250 to 1000 mg, from 300 to 1000 mg, from 350 to 1000 mg, from 400 to 1000 mg, from 450 to 1000 mg, from 500 to 1000 mg, from 550 to 1000 mg, from 600 to 1000 mg, from 650 to 1000 mg, from 700 to 1000 mg, from 750 to 1000 mg, from 800 to 1000 mg, from 850 to 1000 mg, from 900 to 1000 mg, or from 950 to 1000 mg.

[0215] In some embodiments, the method as described herein comprises administering to the human subject a pharmaceutical composition comprising the ASO as described herein at a first dose of from about 0.1 to about 950 mg, from about 0.1 to about 900 mg, from about 0.1 to about 850 mg, from about 0.1 to about 800 mg, from about 0.1 to about 750 mg, from about 0.1 to about 700 mg, from about 0.1 to about 650 mg, from about 0.1 to about 600 mg, from about 0.1 to about 550 mg, from about 0.1 to about 500 mg, from about 0.1 to about 450 mg, from about 0.1 to about 400 mg, from about 0.1 to about 350 mg, from about 0.1 to about 300 mg, from about 0.1 to about 250 mg, from about 0.1 to about 200 mg, from about 0.1 to about 150 mg, from about 0.1 to about 100 mg, from about 0.1 to about 95 mg, from about 0.1 to about 90 mg, from about 0.1 to about 85 mg, from about 0.1 to about 80 mg, from about 0.1 to about 75 mg, from about 0.1 to about 70 mg, from about 0.1 to about 65 mg, from about 0.1 to about 60 mg, from about 0.1 to about 55 mg, from about 0.1 to about 50 mg, from about 0.1 to about 45 mg, from about 0.1 to about 40 mg, from about 0.1 to about 35 mg, from about 0.1 to about 30 mg, from about 0.1 to about mg, from about 0.1 to about 25 mg, from about 0.1 to about 20 mg, from about 0.1 to about 10 mg, from about 0.1 to about 9 mg, from about 0.1 to about 8 mg, from about 0.1 to about 7 mg, from about 0.1 to about 6 mg, from about 0.1 to about 5 mg, from about 0.1 to about 4 mg, from about 0.1 to about 3, from about 0.1 to about 2 mg, from about 0.1 to about 1 mg, from about 0.1 to about 0.9 mg, from about 0.1 to about 0.8 mg, from about 0.1 to about 0.7 mg, from about 0.1 to about 0.6 mg, from about 0.1 to about 0.5 mg, from about 0.1 to about 0.4 mg, from about 0.1 to about 0.3, or from about 0.1 to about 0.2 mg.

[0216] In some embodiments, the method as described herein comprises administering to the human subject a pharmaceutical composition comprising the ASO as described herein at a first dose of from 0.1 to 950 mg, from 0.1 to 900 mg, from 0.1 to 850 mg, from 0.1 to 800 mg, from 0.1 to 750 mg, from 0.1 to 700 mg, from 0.1 to 650 mg, from 0.1 to 600 mg, from 0.1 to 550 mg, from 0.1 to 500 mg, from 0.1 to 450 mg, from 0.1 to 400 mg, from 0.1 to 350 mg, from 0.1 to 300 mg, from 0.1 to 250 mg, from 0.1 to 200 mg, from 0.1 to 150 mg, from 0.1 to 100 mg, from 0.1 to 95 mg, from 0.1 to 90 mg, from 0.1 to 85 mg, from 0.1 to 80 mg, from 0.1 to 75 mg, from 0.1 to 70 mg, from 0.1 to 65 mg, from 0.1 to 60 mg, from 0.1 to 55 mg, from 0.1 to 50 mg, from 0.1 to 45 mg, from 0.1 to 40 mg, from 0.1 to 35 mg, from 0.1 to 30 mg, from 0.1 to mg, from 0.1 to 25 mg, from 0.1 to 20 mg, from 0.1 to 10 mg, from 0.1 to 9 mg, from 0.1 to 8 mg, from 0.1 to 7 mg, from 0.1 to 6 mg, from 0.1 to 5 mg, from 0.1 to 4 mg, from 0.1 to 3, from 0.1 to 2 mg, from 0.1 to 1 mg, from 0.1 to 0.9 mg, from 0.1 to 0.8 mg, from 0.1 to 0.7 mg, from 0.1 to 0.6 mg, from 0.1 to 0.5 mg, from 0.1 to 0.4 mg, from 0.1 to 0.3, or from 0.1 to 0.2 mg.

[0217] In some embodiments, the method as described herein comprises administering to the human subject a pharmaceutical composition comprising the ASO as described herein at a first dose of from about 1 to about 400 mg, from about 2 to about 400 mg, from about 3 to about 400 mg, from about 4 to about 400 mg, from about 5 to about 400 mg, from about 6 to about 400 mg, from about 7 to about 400 mg, from about 8 to about 400 mg, from about 9 to about 400 mg, from about 10 to about 400 mg, from about 20 to about 400 mg, from about 30 to about 400 mg, from about 40 to about 400 mg, from about 50 to about 400 mg, from about 60 to about 400 mg, from about 70 to about 400 mg, from about 80 to about 400 mg, from about 90 to about 400 mg, from about 100 to about 400 mg, from about 110 to about 400 mg, from about 120 to about 400 mg, from about 130 to about 400 mg, from about 140 to about 400 mg, from about 150 to about 400 mg, from about 160 to about 400 mg, from about 170 to about 400 mg, from about 180 to about 400 mg, from about 190 to about 400 mg, from about 200 to about 400 mg, from about 210 to about 400 mg, from about 220 to about 400 mg, from about 230 to about 400 mg, from about 240 to about 400 mg, from about 250 to about 400 mg, from about 260 to about 400 mg, from about 270 to about 400 mg, from about 280 to about 400 mg, from about 290 to about 400 mg, from about 300 to about 400 mg, from about 310 to about 400 mg, from about 320 to about 400 mg, from about 330 to about 400 mg, from about 340 to about 400 mg, from about 350 to about 400 mg, from about 360 to about 400 mg, from about 370 to about 400 mg, from about 380 to about 400 mg, or from about 390 to about 400 mg.

[0218] In some embodiments, the method as described herein comprises administering to the human subject a pharmaceutical composition comprising the ASO as described herein at a first dose of from 1 to 400 mg, from 2 to 400 mg, from 3 to 400 mg, from 4 to 400 mg, from 5 to 400 mg, from 6 to 400 mg, from 7 to 400 mg, from 8 to 400 mg, from 9 to 400 mg, from 10 to 400 mg, from 20 to 400 mg, from 30 to 400 mg, from 40 to 400 mg, from 50 to 400 mg, from 60 to 400 mg, from 70 to 400 mg, from 80 to 400 mg, from 90 to 400 mg, from 100 to 400 mg, from 110 to 400 mg, from 120 to 400 mg, from 130 to 400 mg, from about 140 to 400 mg, from 150 to 400 mg, from about 160 to 400 mg, from 170 to 400 mg, from 180 to 400 mg, from 190 to 400 mg, from 200 to 400 mg, from 210 to 400 mg, from 220 to 400 mg, from 230 to 400 mg, from 240 to 400 mg, from 250 to 400 mg, from 260 to 400 mg, from 270 to 400 mg, from 280 to 400 mg, from 290 to 400 mg, from 300 to 400 mg, from 310 to 400 mg, from 320 to 400 mg, from 330 to 400 mg, from 340 to 400 mg, from 350 to 400 mg, from 360 to 400 mg, from 370 to 400 mg, from 380 to 400 mg, or from 390 to 400 mg.

[0219] In some embodiments, the method as described herein comprises administering to the human subject a pharmaceutical composition comprising the ASO as described herein at a first dose of from about 10 to about 390 mg, from about 10 to about 380 mg, from about 10 to about 370 mg, from about 10 to about 360 mg, from about 10 to about 350 mg, from about 10 to about 340 mg, from about 10 to about 330 mg, from about 10 to about 320 mg, from about 10 to about 310 mg, from about 10 to about 300 mg, from about 10 to about 290 mg, from about 10 to about 280 mg, from about 10 to about 270 mg, from about 10 to about 260 mg, from about 10 to about 250 mg, from about 10 to about 240 mg, from about 10 to about 230 mg, from about 10 to about 220 mg, from about 10 to about 210 mg, from about 10 to about 200 mg, from about 10 to about 190 mg, from about 10 to about 180 mg, from about 10 to about 170 mg, from about 10 to about 160 mg, from about 10 to about 150 mg, from about 10 to about 140 mg, from about 10 to about 130 mg, from about 10 to about 120 mg, from about 10 to about 110 mg, from about 10 to about 90 mg, from about 10 to about 80 mg, from about 10 to about 70 mg, from about 10 to about 60 mg, from about 10 to about 50 mg, from about 10 to about 40 mg, from about 10 to about 30 mg, or from about 10 to about 20 mg.

[0220] In some embodiments, the method as described herein comprises administering to the human subject a pharmaceutical composition comprising the ASO as described herein at a first dose of from 10 to 390 mg, from 10 to 380 mg, from 10 to 370 mg, from 10 to 360 mg, from 10 to 350 mg, from 10 to 340 mg, from 10 to 330 mg, from 10 to 320 mg, from 10 to 310 mg, from 10 to 300 mg, from 10 to 290 mg, from 10 to 280 mg, from 10 to 270 mg, from 10 to 260 mg, from 10 to 250 mg, from 10 to 240 mg, from 10 to 230 mg, from 10 to 220 mg, from 10 to 210 mg, from 10 to 200 mg, from 10 to 190 mg, from 10 to 180 mg, from 10 to 170 mg, from 10 to 160 mg, from 10 to 150 mg, from 10 to 140 mg, from 10 to 130 mg, from 10 to 120 mg, from 10 to 110 mg, from 10 to 90 mg, from 10 to 80 mg, from 10 to 70 mg, from 10 to 60 mg, from 10 to 50 mg, from 10 to 40 mg, from 10 to 30 mg, or from 10 to 20 mg.

[0221] In some embodiments mg, the method as described herein comprises administering to the human subject a pharmaceutical composition comprising the ASO as described herein at a first dose of about 1 mg, about 2 mg, about 3 mg, about 4 mg, about 5 mg, about 6 mg, about 7 mg, about 8 mg, about 9 mg, about 10 mg, about 11 mg, about 12 mg, about 13 mg, about 14 mg, about 15 mg, about 16 mg, about 17 mg, about 18 mg, about 19 mg, about 20 mg, about 21 mg, about 22 mg, about 23 mg, about 24 mg, about 25 mg, about 26 mg, about 27 mg, about 28 mg, about 29 mg, about 30 mg, about 31 mg, about 32 mg, about 33 mg, about 34 mg, about 35 mg, about 36 mg, about 37 mg, about 38 mg, about 39 mg, about 40 mg, about 41 mg, about 42 mg, about 43 mg, about 44 mg, about 45 mg, about 46 mg, about 47 mg, about 48 mg, about 49 mg, about 50 mg, about 51 mg, about 52 mg, about 53 mg, about 54 mg, about 55 mg, about 56 mg, about 57 mg, about 58 mg, about 59 mg, about 60 mg, about 61 mg, about 62 mg, about 63 mg, about 64 mg, about 65 mg, about 66 mg, about 67 mg, about 68 mg, about 69 mg, about 70 mg, about 71 mg, about 72 mg, about 73 mg, about 74 mg, about 75 mg, about 76 mg, about 77 mg, about 78 mg, about 79 mg, about 80 mg, about 81 mg, about 82 mg, about 83 mg, about 84 mg, about 85 mg, about 86 mg, about 87 mg, about 88 mg, about 89 mg, about 90 mg, about 91 mg, about 92 mg, about 93 mg, about 94 mg, about 95 mg, about 96 mg, about 97 mg, about 98 mg, about 99 mg, about 100 mg, about 101 mg, about 102 mg, about 103 mg, about 104 mg, about 105 mg, about 106 mg, about 107 mg, about 108 mg, about 109 mg, about 110 mg, about 111 mg, about 112 mg, about 113 mg, about 114 mg, about 115 mg, about 116 mg, about 117 mg, about 118 mg, about 119 mg, about 120 mg, about 121 mg, about 122 mg, about 123 mg, about 124 mg, about 125 mg, about 126 mg, about 127 mg, about 128 mg, about 129 mg, about 130 mg, about 131 mg, about 132 mg, about 133 mg, about 134 mg, about 135 mg, about 136 mg, about 137 mg, about 138 mg, about 139 mg, about 140 mg, about 141 mg, about 142 mg, about 143 mg, about 144 mg, about 145 mg, about 146 mg, about 147 mg, about 148 mg, about 149 mg, about 150 mg, about 151 mg, about 152 mg, about 153 mg, about 154 mg, about 155 mg, about 156 mg, about 157 mg, about 158 mg, about 159 mg, about 160 mg, about 161 mg, about 162 mg, about 163 mg, about 164 mg, about 165 mg, about 166 mg, about 167 mg, about 168 mg, about 169 mg, about 170 mg, about 171 mg, about 172 mg, about 173 mg, about 174 mg, about 175 mg, about 176 mg, about 177 mg, about 178 mg, about 179 mg, about 180 mg, about 181 mg, about 182 mg, about 183 mg, about 184 mg, about 185 mg, about 186 mg, about 187 mg, about 188 mg, about 189 mg, about 190 mg, about 191 mg, about 192 mg, about 193 mg, about 194 mg, about 195 mg, about 196 mg, about 197 mg, about 198 mg, about 199 mg, about 200 mg, about 201 mg, about 202 mg, about 203 mg, about 204 mg, about 205 mg, about 206 mg, about 207 mg, about 208 mg, about 209 mg, about 210 mg, about 211 mg, about 212 mg, about 213 mg, about 214 mg, about 215 mg, about 216 mg, about 217 mg, about 218 mg, about 219 mg, about 220 mg, about 221 mg, about 222 mg, about 223 mg, about 224 mg, about 225 mg, about 226 mg, about 227 mg, about 228 mg, about 229 mg, about 230 mg, about 231 mg, about 232 mg, about 233 mg, about 234 mg, about 235 mg, about 236 mg, about 237 mg, about 238 mg, about 239 mg, about 240 mg, about 241 mg, about 242 mg, about 243 mg, about 244 mg, about 245 mg, about 246 mg, about 247 mg, about 248 mg, about 249 mg, about 250 mg, about 251 mg, about 252 mg, about 253 mg, about 254 mg, about 255 mg, about 256 mg, about 257 mg, about 258 mg, about 259 mg, about 260 mg, about 261 mg, about 262 mg, about 263 mg, about 264 mg, about 265 mg, about 266 mg, about 267 mg, about 268 mg, about 269 mg, about 270 mg, about 271 mg, about 272 mg, about 273 mg, about 274 mg, about 275 mg, about 276 mg, about 277 mg, about 278 mg, about 279 mg, about 280 mg, about 281 mg, about 282 mg, about 283 mg, about 284 mg, about 285 mg, about 286 mg, about 287 mg, about 288 mg, about 289 mg, about 290 mg, about 291 mg, about 292 mg, about 293 mg, about 294 mg, about 295 mg, about 296 mg, about 297 mg, about 298 mg, about 299 mg, about 300 mg, about 301 mg, about 302 mg, about 303 mg, about 304 mg, about 305 mg, about 306 mg, about 307 mg, about 308 mg, about 309 mg, about 310 mg, about 311 mg, about 312 mg, about 313 mg, about 314 mg, about 315 mg, about 316 mg, about 317 mg, about 318 mg, about 319 mg, about 320 mg, about 321 mg, about 322 mg, about 323 mg, about 324 mg, about 325 mg, about 326 mg, about 327 mg, about 328 mg, about 329 mg, about 330 mg, about 331 mg, about 332 mg, about 333 mg, about 334 mg, about 335 mg, about 336 mg, about 337 mg, about 338 mg, about 339 mg, about 340 mg, about 341 mg, about 342 mg, about 343 mg, about 344 mg, about 345 mg, about 346 mg, about 347 mg, about 348 mg, about 349 mg, about 350 mg, about 351 mg, about 352 mg, about 353 mg, about 354 mg, about 355 mg, about 356 mg, about 357 mg, about 358 mg, about 359 mg, about 360 mg, about 361 mg, about 362 mg, about 363 mg, about 364 mg, about 365 mg, about 366 mg, about 367 mg, about 368 mg, about 369 mg, about 370 mg, about 371 mg, about 372 mg, about 373 mg, about 374 mg, about 375 mg, about 376 mg, about 377 mg, about 378 mg, about 379 mg, about 380 mg, about 381 mg, about 382 mg, about 383 mg, about 384 mg, about 385 mg, about 386 mg, about 387 mg, about 388 mg, about 389 mg, about 390 mg, about 391 mg, about 392 mg, about 393 mg, about 394 mg, about 395 mg, about 396 mg, about 397 mg, about 398 mg, about 399 mg, or 400 mg.

[0222] In some embodiments mg, the method as described herein comprises administering to the human subject a pharmaceutical composition comprising the ASO as described herein at a first dose of 1 mg, 2 mg, 3 mg, 4 mg, 5 mg, 6 mg, 7 mg, 8 mg, 9 mg, 10 mg, 11 mg, 12 mg, 13 mg, 14 mg, 15 mg, 16 mg, 17 mg, 18 mg, 19 mg, 20 mg, 21 mg, 22 mg, 23 mg, 24 mg, 25 mg, 26 mg, 27 mg, 28 mg, 29 mg, 30 mg, 31 mg, 32 mg, 33 mg, 34 mg, 35 mg, 36 mg, 37 mg, 38 mg, 39 mg, 40 mg, 41 mg, 42 mg, 43 mg, 44 mg, 45 mg, 46 mg, 47 mg, 48 mg, 49 mg, 50 mg, 51 mg, 52 mg, 53 mg, 54 mg, 55 mg, 56 mg, 57 mg, 58 mg, 59 mg, 60 mg, 61 mg, 62 mg, 63 mg, 64 mg, 65 mg, 66 mg, 67 mg, 68 mg, 69 mg, 70 mg, 71 mg, 72 mg, 73 mg, 74 mg, 75 mg, 76 mg, 77 mg, 78 mg, 79 mg, 80 mg, 81 mg, 82 mg, 83 mg, 84 mg, 85 mg, 86 mg, 87 mg, 88 mg, 89 mg, 90 mg, 91 mg, 92 mg, 93 mg, 94 mg, 95 mg, 96 mg, 97 mg, 98 mg, 99 mg, 100 mg, 101 mg, 102 mg, 103 mg, 104 mg, 105 mg, 106 mg, 107 mg, 108 mg, 109 mg, 110 mg, 111 mg, 112 mg, 113 mg, 114 mg, 115 mg, 116 mg, 117 mg, 118 mg, 119 mg, 120 mg, 121 mg, 122 mg, 123 mg, 124 mg, 125 mg, 126 mg, 127 mg, 128 mg, 129 mg, 130 mg, 131 mg, 132 mg, 133 mg, 134 mg, 135 mg, 136 mg, 137 mg, 138 mg, 139 mg, 140 mg, 141 mg, 142 mg, 143 mg, 144 mg, 145 mg, 146 mg, 147 mg, 148 mg, 149 mg, 150 mg, 151 mg, 152 mg, 153 mg, 154 mg, 155 mg, 156 mg, 157 mg, 158 mg, 159 mg, 160 mg, 161 mg, 162 mg, 163 mg, 164 mg, 165 mg, 166 mg, 167 mg, 168 mg, 169 mg, 170 mg, 171 mg, 172 mg, 173 mg, 174 mg, 175 mg, 176 mg, 177 mg, 178 mg, 179 mg, 180 mg, 181 mg, 182 mg, 183 mg, 184 mg, 185 mg, 186 mg, 187 mg, 188 mg, 189 mg, 190 mg, 191 mg, 192 mg, 193 mg, 194 mg, 195 mg, 196 mg, 197 mg, 198 mg, 199 mg, 200 mg, 201 mg, 202 mg, 203 mg, 204 mg, 205 mg, 206 mg, 207 mg, 208 mg, 209 mg, 210 mg, 211 mg, 212 mg, 213 mg, 214 mg, 215 mg, 216 mg, 217 mg, 218 mg, 219 mg, 220 mg, 221 mg, 222 mg, 223 mg, 224 mg, 225 mg, 226 mg, 227 mg, 228 mg, 229 mg, 230 mg, 231 mg, 232 mg, 233 mg, 234 mg, 235 mg, 236 mg, 237 mg, 238 mg, 239 mg, 240 mg, 241 mg, 242 mg, 243 mg, 244 mg, 245 mg, 246 mg, 247 mg, 248 mg, 249 mg, 250 mg, 251 mg, 252 mg, 253 mg, 254 mg, 255 mg, 256 mg, 257 mg, 258 mg, 259 mg, 260 mg, 261 mg, 262 mg, 263 mg, 264 mg, 265 mg, 266 mg, 267 mg, 268 mg, 269 mg, 270 mg, 271 mg, 272 mg, 273 mg, 274 mg, 275 mg, 276 mg, 277 mg, 278 mg, 279 mg, 280 mg, 281 mg, 282 mg, 283 mg, 284 mg, 285 mg, 286 mg, 287 mg, 288 mg, 289 mg, 290 mg, 291 mg, 292 mg, 293 mg, 294 mg, 295 mg, 296 mg, 297 mg, 298 mg, 299 mg, 300 mg, 301 mg, 302 mg, 303 mg, 304 mg, 305 mg, 306 mg, 307 mg, 308 mg, 309 mg, 310 mg, 311 mg, 312 mg, 313 mg, 314 mg, 315 mg, 316 mg, 317 mg, 318 mg, 319 mg, 320 mg, 321 mg, 322 mg, 323 mg, 324 mg, 325 mg, 326 mg, 327 mg, 328 mg, 329 mg, 330 mg, 331 mg, 332 mg, 333 mg, 334 mg, 335 mg, 336 mg, 337 mg, 338 mg, 339 mg, 340 mg, 341 mg, 342 mg, 343 mg, 344 mg, 345 mg, 346 mg, 347 mg, 348 mg, 349 mg, 350 mg, 351 mg, 352 mg, 353 mg, 354 mg, 355 mg, 356 mg, 357 mg, 358 mg, 359 mg, 360 mg, 361 mg, 362 mg, 363 mg, 364 mg, 365 mg, 366 mg, 367 mg, 368 mg, 369 mg, 370 mg, 371 mg, 372 mg, 373 mg, 374 mg, 375 mg, 376 mg, 377 mg, 378 mg, 379 mg, 380 mg, 381 mg, 382 mg, 383 mg, 384 mg, 385 mg, 386 mg, 387 mg, 388 mg, 389 mg, 390 mg, 391 mg, 392 mg, 393 mg, 394 mg, 395 mg, 396 mg, 397 mg, 398 mg, 399 mg, or 400 mg

### Therapeutic Target Population

[0223] In some embodiments, the human subject is at most 18 years old. In some embodiments, the human subject is from 1 to 18, from 2 to 18, from 3 to 18, from 4 to 18, from 5 to 18, from 6 to 18, from 7 to 18, from 8 to 18, from 9 to 18, from 10 to 18, from 11 to 18, from 12 to 18, from 13 to 18, from 14 to 18, from 15 to 18, from 16 to 18, or from 17 to 18 years old. In some embodiments, the human subject is a human from 1 to 17, from 1 to 16, from 1 to 15, from 1 to 14, from 1 to 13, from 1 to 12, from 1 to 11, from 1 to 10, from 1 to 9, from 1 to 8, from 1 to 7, from 1 to 6, from 1 to 5, from 1 to 4, from 1 to 3, or from 1 to 2 years old. In some embodiments, the human subject is less than a year old or 1, 2, 3, 4, 5, 6, 7, 8, 9, 10, 11, 12, 13, 14, 15, 16, 17, or 18 years old.

[0224] In some embodiments, the human subject is at most 35 years, 30 years, 29 years, 28 years, 27 years, 26 years, 25 years, 24 years, 23 years, 22 years, 21 years, 20 years, 19 years, 18 years, 17 years, 16 years, 15 years, 14 years, 13 years, 12 years, 11 years, 10 years, 9 years, 8 years, 7 years, 6 years, 5 years, 4 years, 3 years, 2 years, or 1 year old.

[0225] In some embodiments, the human subject is less than a year old or 1, 2, 3, 4, 5, 6, 7, 8, 9, 10, 11, 12, 13, 14, 15, 16, 17, 18, 19, 20, 21, 22, 23, 24, 25, 26, 27, 28, 29, 30, 31, 32, 33, 34, or 35 years old.

[0226] In some embodiments, the human subject is from 1 to 35, from 2 to 35, from 3 to 35, from 4 to 35, from 5 to 35, from 6 to 35, from 7 to 35, from 8 to 35, from 9 to 35, from 10 to 35, from 11 to 35, from 12 to 35, from 13 to 35, from 14 to 35, from 15 to 35, from 16 to 35, 17 to 35, from 18 to 35, from 19 to 35, from 20 to 35, from 21 to 35, from 22 to 35, from 23 to 35, from 24 to 35, from 25 to 35, from 26 to 35, from 27 to 35, from 28 to 35, from 29 to 35, from 30 to 35, from 31 to 35, from 32 to 35, from 33 to 35, or from 34 to 35 years old.

[0227] In some embodiments, the human subject is a human from 1 to 35, from 1 to 34, from 1 to 33, from 1 to 32, from 1 to 31, from 1 to 30, from 1 to 29, from 1 to 28, from 1 to 27, from 1 to 26, from 1 to 25, from 1 to 24, from 1 to 23, from 1 to 22, from 1 to 21, from 1 to 20, from 1 to 19, from 1 to 18, from 1 to 17, from 1 to 16, from 1 to 15, from 1 to 14, from 1 to 13, from 1 to 12, from 1 to 11, from 1 to 10, from 1 to 9, from 1 to 8, from 1 to 7, from 1 to 6, from 1 to 5, from 1 to 4, from 1 to 3, or from 1 to 2 years old.

[0228] In some embodiments, the human subject is a human from 2 to 35, from 2 to 34, from 2 to 33, from 2 to 32, from 2 to 31, from 2 to 30, from 2 to 29, from 2 to 28, from 2 to 27, from 2 to 26, from 2 to 25, from 2 to 24, from 2 to 23, from 2 to 22, from 2 to 21, from 2 to 20, from 2 to 19, from 2 to 18, from 2 to 17, from 2 to 16, from 2 to 15, from 2 to 14, from 2 to 13, from 2 to 12, from 2 to 11, from 2 to 10, from 2 to 9, from 2 to 8, from 2 to 7, from 2 to 6, from 2 to 5, from 2 to 4, or from 2 to 3 years old. In some embodiments, the human subject is a human from 3 to 35, from 3 to 34, from 3 to 33, from 3 to 32, from 3 to 31, from 3 to 30, from 3 to 29, from 3 to 28, from 3 to 27, from 3 to 26, from 3 to 25, from 3 to 24, from 3 to 23, from 3 to 22, from 3 to 21, from 3 to 20, from 3 to 19, from 3 to 18, from 3 to 17, from 3 to 16, from 3 to 15, from 3 to 14, from 3 to 13, from 3 to 12, from 3 to 11, from 3 to 10, from 3 to 9, from 3 to 8, from 3 to 7, from 3 to 6, from 3 to 5, or from 3 to 4 years old.

[0229] In some embodiments, the human subject is a human from 4 to 35, from 4 to 34, from 4 to 33, from 4 to 32, from 4 to 31, from 4 to 30, from 4 to 29, from 4 to 28, from 4 to 27, from 4 to 26, from 4 to 25, from 4 to 24, from 4 to 23, from 4 to 22, from 4 to 21, from 4 to 20, from 4 to 19, from 4 to 18, from 4 to 17, from 4 to 16, from 4 to 15, from 4 to 14, from 4 to 13, from 4 to 12, from 4 to 11, from 4 to 10, from 4 to 9, from 4 to 8, from 4 to 7, from 4 to 6, or from 4 to 5 years old.

[0230] In some embodiments, the human subject is a human from 5 to 35, from 5 to 34, from 5 to 33, from 5 to 32, from 5 to 31, from 5 to 30, from 5 to 29, from 5 to 28, from 5 to 27, from 5 to 26, from 5 to 25, from 5 to 24, from 5 to 23, from 5 to 22, from 5 to 21, from 5 to 20, from 5 to 19, from 5 to 18, from 5 to 17, from 5 to 16, from 5 to 15, from 5 to 14, from 5 to 13, from 5 to 12, from 5 to 11, from 5 to 10, from 5 to 9, from 5 to 8, from 5 to 7, or from 5 to 6 years old.

[0231] In some embodiments, the human subject is a human from 6 to 35, from 6 to 34, from 6 to 33, from 6 to 32, from 6 to 31, from 6 to 30, from 6 to 29, from 6 to 28, from 6 to 27, from 6 to 26, from 6 to 25, from 6 to 24, from 6 to 23, from 6 to 22, from 6 to 21, from 6 to 20, from 6 to 19, from 6 to 18, from 6 to 17, from 6 to 16, from 6 to 15, from 6 to 14, from 6 to 13, from 6 to 12, from 6 to 11, from 6 to 10, from 6 to 9, from 6 to 8, or from 6 to 7 years old.

[0232] In some embodiments, the human subject is a human from 7 to 35, from 7 to 34, from 7 to 33, from 7 to 32, from 7 to 31, from 7 to 30, from 7 to 29, from 7 to 28, from 7 to 27, from 7 to 26, from 7 to 25, from 7 to 24, from 7 to 23, from 7 to 22, from 7 to 21, from 7 to 20, from 7 to 19, from 7 to 18, from 7 to 17, from 7 to 16, from 7 to 15, from 7 to 14, from 7 to 13, from 7 to 12, from 7 to 11, from 7 to 10, from 7 to 9, from 7 to 8 years old.

[0233] In some embodiments, the human subject is a human from 8 to 35, from 8 to 34, from 8 to 33, from 8 to 32, from 8 to 31, from 8 to 30, from 8 to 29, from 8 to 28, from 8 to 27, from 8 to 26, from 8 to 25, from 8 to 24, from 8 to 23, from 8 to 22, from 8 to 21, from 8 to 20, from 8 to 19, from 8 to 18, from 8 to 17, from 8 to 16, from 8 to 15, from 8 to 14, from 8 to 13, from 8 to 12, from 8 to 11, from 8 to 10, or from 8 to 9 years old.

[0234] In some embodiments, the subject is characterized by having: (i) seizure onset prior to 12 months of age with recurrent focal motor or hemiconvulsive or generalized tonic-clonic seizures, which are often prolonged and triggered by hyperthermia; (ii) no past history of causal magnetic resonance imaging lesion; (iii) no other known etiology of any diseases or conditions except Dravet Syndrome; (iv) normal development at seizure onset; (v) a pathogenic variant, or variant of uncertain significance in an SCN1A gene; (vi) at least 2 prior treatments for epilepsy that either had lack of adequate seizure control; (vii) 4 or more convulsive seizures during the 28 days prior to administering, wherein the convulsive seizures is any one selected from Hemiclonic, Focal With Motor Signs, Focal To Bilateral Tonic Clonic Convulsion, Generalized Tonic Clonic Convulsion, Tonic, Tonic or Atonic (Drop Attacks), and Clonic; (viii) a current intervention for epilepsy or medication with at least one antiepileptic drug at a dose which has been stable for at least 4 weeks, wherein the interventions for epilepsy is a ketogenic diet, a vagal nerve stimulator, or a cannabinoid or marijuana-derived product; or (ix) any combination of (i)-(viii).

[0235] In some embodiments, the subject is characterized by having at least one or more of: (i) seizure onset prior to 12 months of age with recurrent focal motor or hemiconvulsive or generalized tonic-clonic seizures, which are often prolonged and triggered by hyperthermia; (ii) no past history of causal magnetic resonance imaging lesion; (iii) no other known etiology of any diseases or conditions except Dravet Syndrome; (iv) normal development at seizure onset; (v) a pathogenic variant, or variant of uncertain significance in an SCN1A gene; (vi) at least 2 prior treatments for epilepsy that either had lack of adequate seizure control; (vii) 4 or more convulsive seizures during the 28 days prior to administering, wherein the convulsive seizures is any one selected from Hemiclonic, Focal With Motor Signs, Focal To Bilateral Tonic Clonic Convulsion, Generalized Tonic Clonic Convulsion, Tonic, Tonic or Atonic (Drop Attacks), and Clonic; and (viii) a current intervention for epilepsy or medication with at least one antiepileptic drug at a dose which has been stable for at least 4 weeks, wherein the interventions for epilepsy is a ketogenic diet, a vagal nerve stimulator, or a cannabinoid or marijuana-derived product. In some embodiments, the subject is characterized by having at least two or more of: (i) seizure onset prior to 12 months of age with recurrent focal motor or hemiconvulsive or generalized tonic-clonic seizures, which are often prolonged and triggered by hyperthermia; (ii) no past history of causal magnetic resonance imaging lesion; (iii) no other known etiology of any diseases or conditions except Dravet Syndrome; (iv) normal development at seizure onset; (v) a pathogenic variant, or variant of uncertain significance in an SCN1A gene; (vi) at least 2 prior treatments for epilepsy that either had lack of adequate seizure control; (vii) 4 or more convulsive seizures during the 28 days prior to administering, wherein the convulsive seizures is any one selected from Hemiclonic, Focal With Motor Signs, Focal To Bilateral Tonic Clonic Convulsion, Generalized Tonic Clonic Convulsion, Tonic, Tonic or Atonic (Drop Attacks), and Clonic; and (viii) a current intervention for epilepsy or medication with at least one antiepileptic drug at a dose which has been stable for at least 4 weeks, wherein the interventions for epilepsy is a ketogenic diet, a vagal nerve stimulator, or a cannabinoid or marijuana-derived product. In some embodiments, the subject is characterized by having at least three or more of: (i) seizure onset prior to 12 months of age with recurrent focal motor or hemiconvulsive or generalized tonic-clonic seizures, which are often prolonged and triggered by hyperthermia; (ii) no past history of causal magnetic resonance imaging lesion; (iii) no other known etiology of any diseases or conditions except Dravet Syndrome; (iv) normal development at seizure onset; (v) a pathogenic variant, or variant of uncertain significance in an SCN1A gene; (vi) at least 2 prior treatments for epilepsy that either had lack of adequate seizure control; (vii) 4 or more convulsive seizures during the 28 days prior to administering, wherein the convulsive seizures is any one selected from Hemiclonic, Focal With Motor Signs, Focal To Bilateral Tonic Clonic Convulsion, Generalized Tonic Clonic Convulsion, Tonic, Tonic or Atonic (Drop Attacks), and Clonic; and (viii) a current intervention for epilepsy or medication with at least one antiepileptic drug at a dose which has been stable for at least 4 weeks, wherein the interventions for epilepsy is a ketogenic diet, a vagal nerve stimulator, or a cannabinoid or marijuana-derived product. In some embodiments, the subject is characterized by having at least four or more of: (i) seizure onset prior to 12 months of age with recurrent focal motor or hemiconvulsive or generalized tonic-clonic seizures, which are often prolonged and triggered by hyperthermia; (ii) no past history of causal magnetic resonance imaging lesion; (iii) no other known etiology of any diseases or conditions except Dravet Syndrome; (iv) normal development at seizure onset; (v) a pathogenic variant, or variant of uncertain significance in an SCN1A gene; (vi) at least 2 prior treatments for epilepsy that either had lack of adequate seizure control; (vii) 4 or more convulsive seizures during the 28 days prior to administering, wherein the convulsive seizures is any one selected from Hemiclonic, Focal With Motor Signs, Focal To Bilateral Tonic Clonic Convulsion, Generalized Tonic Clonic Convulsion, Tonic, Tonic or Atonic (Drop Attacks), and Clonic; and (viii) a current intervention for epilepsy or medication with at least one antiepileptic drug at a dose which has been stable for at least 4 weeks, wherein the interventions for epilepsy is a ketogenic diet, a vagal nerve stimulator, or a cannabinoid or marijuana-derived product. In some embodiments, the subject is characterized by having at least five or more of: (i) seizure onset prior to 12 months of age with recurrent focal motor or hemiconvulsive or generalized tonic-clonic seizures, which are often prolonged and triggered by hyperthermia; (ii) no past history of causal magnetic resonance imaging lesion; (iii) no other known etiology of any diseases or conditions except Dravet Syndrome; (iv) normal development at seizure onset; (v) a pathogenic variant, or variant of uncertain significance in an SCN1A gene; (vi) at least 2 prior treatments for epilepsy that either had lack of adequate seizure control; (vii) 4 or more convulsive seizures during the 28 days prior to administering, wherein the convulsive seizures is any one selected from Hemiclonic, Focal With Motor Signs, Focal To Bilateral Tonic Clonic Convulsion, Generalized Tonic Clonic Convulsion, Tonic, Tonic or Atonic (Drop Attacks), and Clonic; and (viii) a current intervention for epilepsy or medication with at least one antiepileptic drug at a dose which has been stable for at least 4 weeks, wherein the interventions for epilepsy is a ketogenic diet, a vagal nerve stimulator, or a cannabinoid or marijuana-derived product. In some embodiments, the subject is characterized by having at least six or more of: (i) seizure onset prior to 12 months of age with recurrent focal motor or hemiconvulsive or generalized tonic-clonic seizures, which are often prolonged and triggered by hyperthermia; (ii) no past history of causal magnetic resonance imaging lesion; (iii) no other known etiology of any diseases or conditions except Dravet Syndrome; (iv) normal development at seizure onset; (v) a pathogenic variant, or variant of uncertain significance in an SCN1A gene; (vi) at least 2 prior treatments for epilepsy that either had lack of adequate seizure control; (vii) 4 or more convulsive seizures during the 28 days prior to administering, wherein the convulsive seizures is any one selected from Hemiclonic, Focal With Motor Signs, Focal To Bilateral Tonic Clonic Convulsion, Generalized Tonic Clonic Convulsion, Tonic, Tonic or Atonic (Drop Attacks), and Clonic; and (viii) a current intervention for epilepsy or medication with at least one antiepileptic drug at a dose which has been stable for at least 4 weeks, wherein the interventions for epilepsy is a ketogenic diet, a vagal nerve stimulator, or a cannabinoid or marijuana-derived product. In some embodiments, the subject is characterized by having at least seven or more of: (i) seizure onset prior to 12 months of age with recurrent focal motor or hemiconvulsive or generalized tonic-clonic seizures, which are often prolonged and triggered by hyperthermia; (ii) no past history of causal magnetic resonance imaging lesion; (iii) no other known etiology of any diseases or conditions except Dravet Syndrome; (iv) normal development at seizure onset; (v) a pathogenic variant, or variant of uncertain significance in an SCN1A gene; (vi) at least 2 prior treatments for epilepsy that either had lack of adequate seizure control; (vii) 4 or more convulsive seizures during the 28 days prior to administering, wherein the convulsive seizures is any one selected from Hemiclonic, Focal With Motor Signs, Focal To Bilateral Tonic Clonic Convulsion, Generalized Tonic Clonic Convulsion, Tonic, Tonic or Atonic (Drop Attacks), and Clonic; and (viii) a current intervention for epilepsy or medication with at least one antiepileptic drug at a dose which has been stable for at least 4 weeks, wherein the interventions for epilepsy is a ketogenic diet, a vagal nerve stimulator, or a cannabinoid or marijuana-derived product. In some embodiments, the subject is characterized by having all eight of: (i) seizure onset prior to 12 months of age with recurrent focal motor or hemiconvulsive or generalized tonic-clonic seizures, which are often prolonged and triggered by hyperthermia; (ii) no past history of causal magnetic resonance imaging lesion; (iii) no other known etiology of any diseases or conditions except Dravet Syndrome; (iv) normal development at seizure onset; (v) a pathogenic variant, or variant of uncertain significance in an SCN1A gene; (vi) at least 2 prior treatments for epilepsy that either had lack of adequate seizure control; (vii) 4 or more convulsive seizures during the 28 days prior to administering, wherein the convulsive seizures is any one selected from Hemiclonic, Focal With Motor Signs, Focal To Bilateral Tonic Clonic Convulsion, Generalized Tonic Clonic Convulsion, Tonic, Tonic or Atonic (Drop Attacks), and Clonic; and (viii) a current intervention for epilepsy or medication with at least one antiepileptic drug at a dose which has been stable for at least 4 weeks, wherein the interventions for epilepsy is a ketogenic diet, a vagal nerve stimulator, or a cannabinoid or marijuana-derived product.

[0236] In some embodiments, the subject is additionally characterized by not having one or more of the following: (a) one of the following mutations in the SCN1A gene: Thr226Met, Leu263Val, Val422Leu, Thr1174Ser, Trp1204Arg, Pro1345Ser, Gln1489Lys, Phe1499Leu, Arg1575Cys, Val1611Phe, Leu1624Pro, Arg1648Cys, Leu1649Gln, Leu1670Trp, Gly1674Arg, and Asp1866Tyr; (b) a known pathogenic mutation in another gene that causes epilepsy, wherein the pathogenic mutation is homozygous in cases of known recessive disease; (c) currently treated with a sodium channel blocker as maintenance treatment and an anticoagulant, wherein the sodium channel blocker is phenytoin, carbamazepine, oxcarbazepine, lamotrigine, lacosamide, or rufinamide, and wherein the anticoagulant is not an aspirin; (d) clinically, significantly unstable medical conditions other than epilepsy; (e) clinically, relevant symptoms or a clinically significant illness in the 4 weeks prior to administering, other than epilepsy; (f) a history of brain or spinal cord disease other than epilepsy, Dravet Syndrome or a history of bacterial meningitis or brain malformation; (g) a spinal deformity or other condition that alters the free flow of cerebrospinal fluid (CSF) or having an implanted CSF drainage shunt; (h) clinically significant abnormal laboratory values prior to administering; (i) aspartate aminotransferase or alanine aminotransferase>2.5-fold upper limit of normal, serum creatinine>upper limit of normal or platelet count<lower limit of normal; (j) clinically relevant abnormalities in the 12-lead electrocardiogram (ECG) measured at prior to administering; (k) a psychiatric or behavioral disorder; (l) currently or in the past 4 weeks, medication of an anticoagulant, wherein the anticoagulant is not aspirin; or (m) any combination of (a)-(l). In some embodiments, the subject is characterized by not having one or more of the following: (a) one of the following mutations in the SCN1A gene: Thr226Met, Leu263Val, Val422Leu, Thr1174Ser, Trp1204Arg, Pro1345Ser, Gln1489Lys, Phe1499Leu, Arg1575Cys, Val1611Phe, Leu1624Pro, Arg1648Cys, Leu1649Gln, Leu1670Trp, Gly1674Arg, and Asp1866Tyr; (b) a known pathogenic mutation in another gene that causes epilepsy, wherein the pathogenic mutation is homozygous in cases of known recessive disease; (c) currently treated with a sodium channel blocker as maintenance treatment and an anticoagulant, wherein the sodium channel blocker is phenytoin, carbamazepine, oxcarbazepine, lamotrigine, lacosamide, or rufinamide, and wherein the anticoagulant is not an aspirin; (d) clinically, significantly unstable medical conditions other than epilepsy; (e) clinically, relevant symptoms or a clinically significant illness in the 4 weeks prior to administering, other than epilepsy; (f) a history of brain or spinal cord disease other than epilepsy, Dravet Syndrome or a history of bacterial meningitis or brain malformation; (g) a spinal deformity or other condition that alters the free flow of cerebrospinal fluid (CSF) or having an implanted CSF drainage shunt; (h) clinically significant abnormal laboratory values prior to administering; (i) aspartate aminotransferase or alanine aminotransferase>2.5-fold upper limit of normal, serum creatinine>upper limit of normal or platelet count<lower limit of normal; (j) clinically relevant abnormalities in the 12-lead electrocardiogram (ECG) measured at prior to administering; (k) a psychiatric or behavioral disorder; and (l) currently or in the past 4 weeks, medication of an anticoagulant, wherein the anticoagulant is not aspirin. In some embodiments, the subject is additionally characterized by not having two or more of the following: (a) one of the following mutations in the SCN1A gene: Thr226Met, Leu263Val, Val422Leu, Thr1174Ser, Trp1204Arg, Pro1345Ser, Gln1489Lys, Phe1499Leu, Arg1575Cys, Val1611Phe, Leu1624Pro, Arg1648Cys, Leu1649Gln, Leu1670Trp, Gly1674Arg, and Asp1866Tyr; (b) a known pathogenic mutation in another gene that causes epilepsy, wherein the pathogenic mutation is homozygous in cases of known recessive disease; (c) currently treated with a sodium channel blocker as maintenance treatment and an anticoagulant, wherein the sodium channel blocker is phenytoin, carbamazepine, oxcarbazepine, lamotrigine, lacosamide, or rufinamide, and wherein the anticoagulant is not an aspirin; (d) clinically, significantly unstable medical conditions other than epilepsy; (e) clinically, relevant symptoms or a clinically significant illness in the 4 weeks prior to administering, other than epilepsy; (f) a history of brain or spinal cord disease other than epilepsy, Dravet Syndrome or a history of bacterial meningitis or brain malformation; (g) a spinal deformity or other condition that alters the free flow of cerebrospinal fluid (CSF) or having an implanted CSF drainage shunt; (h) clinically significant abnormal laboratory values prior to administering; (i) aspartate aminotransferase or alanine aminotransferase>2.5-fold upper limit of normal, serum creatinine>upper limit of normal or platelet count<lower limit of normal; (j) clinically relevant abnormalities in the 12-lead electrocardiogram (ECG) measured at prior to administering; (k) a psychiatric or behavioral disorder; and (l) currently or in the past 4 weeks, medication of an anticoagulant, wherein the anticoagulant is not aspirin. In some embodiments, the subject is additionally characterized by not having three or more of the following: (a) one of the following mutations in the SCN1A gene: Thr226Met, Leu263Val, Val422Leu, Thr1174Ser, Trp1204Arg, Pro1345Ser, Gln1489Lys, Phe1499Leu, Arg1575Cys, Val1611Phe, Leu1624Pro, Arg1648Cys, Leu1649Gln, Leu1670Trp, Gly1674Arg, and Asp1866Tyr; (b) a known pathogenic mutation in another gene that causes epilepsy, wherein the pathogenic mutation is homozygous in cases of known recessive disease; (c) currently treated with a sodium channel blocker as maintenance treatment and an anticoagulant, wherein the sodium channel blocker is phenytoin, carbamazepine, oxcarbazepine, lamotrigine, lacosamide, or rufinamide, and wherein the anticoagulant is not an aspirin; (d) clinically, significantly unstable medical conditions other than epilepsy; (e) clinically, relevant symptoms or a clinically significant illness in the 4 weeks prior to administering, other than epilepsy; (f) a history of brain or spinal cord disease other than epilepsy, Dravet Syndrome or a history of bacterial meningitis or brain malformation; (g) a spinal deformity or other condition that alters the free flow of cerebrospinal fluid (CSF) or having an implanted CSF drainage shunt; (h) clinically significant abnormal laboratory values prior to administering; (i) aspartate aminotransferase or alanine aminotransferase>2.5-fold upper limit of normal, serum creatinine>upper limit of normal or platelet count<lower limit of normal; (j) clinically relevant abnormalities in the 12-lead electrocardiogram (ECG) measured at prior to administering; (k) a psychiatric or behavioral disorder; and (l) currently or in the past 4 weeks, medication of an anticoagulant, wherein the anticoagulant is not aspirin. In some embodiments, the subject is additionally characterized by not having four or more of the following: (a) one of the following mutations in the SCN1A gene: Thr226Met, Leu263Val, Val422Leu, Thr1174Ser, Trp1204Arg, Pro1345Ser, Gln1489Lys, Phe1499Leu, Arg1575Cys, Val1611Phe, Leu1624Pro, Arg1648Cys, Leu1649Gln, Leu1670Trp, Gly1674Arg, and Asp1866Tyr; (b) a known pathogenic mutation in another gene that causes epilepsy, wherein the pathogenic mutation is homozygous in cases of known recessive disease; (c) currently treated with a sodium channel blocker as maintenance treatment and an anticoagulant, wherein the sodium channel blocker is phenytoin, carbamazepine, oxcarbazepine, lamotrigine, lacosamide, or rufinamide, and wherein the anticoagulant is not an aspirin; (d) clinically, significantly unstable medical conditions other than epilepsy; (e) clinically, relevant symptoms or a clinically significant illness in the 4 weeks prior to administering, other than epilepsy; (f) a history of brain or spinal cord disease other than epilepsy, Dravet Syndrome or a history of bacterial meningitis or brain malformation; (g) a spinal deformity or other condition that alters the free flow of cerebrospinal fluid (CSF) or having an implanted CSF drainage shunt; (h) clinically significant abnormal laboratory values prior to administering; (i) aspartate aminotransferase or alanine aminotransferase>2.5-fold upper limit of normal, serum creatinine>upper limit of normal or platelet count<lower limit of normal; (j) clinically relevant abnormalities in the 12-lead electrocardiogram (ECG) measured at prior to administering; (k) a psychiatric or behavioral disorder; and (l) currently or in the past 4 weeks, medication of an anticoagulant, wherein the anticoagulant is not aspirin. In some embodiments, the subject is additionally characterized by not having five or more of the following: (a) one of the following mutations in the SCN1A gene: Thr226Met, Leu263Val, Val422Leu, Thr1174Ser, Trp1204Arg, Pro1345Ser, Gln1489Lys, Phe1499Leu, Arg1575Cys, Val1611Phe, Leu1624Pro, Arg1648Cys, Leu1649Gln, Leu1670Trp, Gly1674Arg, and Asp1866Tyr; (b) a known pathogenic mutation in another gene that causes epilepsy, wherein the pathogenic mutation is homozygous in cases of known recessive disease; (c) currently treated with a sodium channel blocker as maintenance treatment and an anticoagulant, wherein the sodium channel blocker is phenytoin, carbamazepine, oxcarbazepine, lamotrigine, lacosamide, or rufinamide, and wherein the anticoagulant is not an aspirin; (d) clinically, significantly unstable medical conditions other than epilepsy; (e) clinically, relevant symptoms or a clinically significant illness in the 4 weeks prior to administering, other than epilepsy; (f) a history of brain or spinal cord disease other than epilepsy, Dravet Syndrome or a history of bacterial meningitis or brain malformation; (g) a spinal deformity or other condition that alters the free flow of cerebrospinal fluid (CSF) or having an implanted CSF drainage shunt; (h) clinically significant abnormal laboratory values prior to administering; (i) aspartate aminotransferase or alanine aminotransferase>2.5-fold upper limit of normal, serum creatinine>upper limit of normal or platelet count<lower limit of normal; (j) clinically relevant abnormalities in the 12-lead electrocardiogram (ECG) measured at prior to administering; (k) a psychiatric or behavioral disorder; and (l) currently or in the past 4 weeks, medication of an anticoagulant, wherein the anticoagulant is not aspirin. In some embodiments, the subject is additionally characterized by not having six or more of the following: (a) one of the following mutations in the SCN1A gene: Thr226Met, Leu263Val, Val422Leu, Thr1174Ser, Trp1204Arg, Pro1345Ser, Gln1489Lys, Phe1499Leu, Arg1575Cys, Val1611Phe, Leu1624Pro, Arg1648Cys, Leu1649Gln, Leu1670Trp, Gly1674Arg, and Asp1866Tyr; (b) a known pathogenic mutation in another gene that causes epilepsy, wherein the pathogenic mutation is homozygous in cases of known recessive disease; (c) currently treated with a sodium channel blocker as maintenance treatment and an anticoagulant, wherein the sodium channel blocker is phenytoin, carbamazepine, oxcarbazepine, lamotrigine, lacosamide, or rufinamide, and wherein the anticoagulant is not an aspirin; (d) clinically, significantly unstable medical conditions other than epilepsy; (e) clinically, relevant symptoms or a clinically significant illness in the 4 weeks prior to administering, other than epilepsy; (f) a history of brain or spinal cord disease other than epilepsy, Dravet Syndrome or a history of bacterial meningitis or brain malformation; (g) a spinal deformity or other condition that alters the free flow of cerebrospinal fluid (CSF) or having an implanted CSF drainage shunt; (h) clinically significant abnormal laboratory values prior to administering; (i) aspartate aminotransferase or alanine aminotransferase>2.5-fold upper limit of normal, serum creatinine>upper limit of normal or platelet count<lower limit of normal; (j) clinically relevant abnormalities in the 12-lead electrocardiogram (ECG) measured at prior to administering; (k) a psychiatric or behavioral disorder; and (l) currently or in the past 4 weeks, medication of an anticoagulant, wherein the anticoagulant is not aspirin. In some embodiments, the subject is additionally characterized by not having seven or more of the following: (a) one of the following mutations in the SCN1A gene: Thr226Met, Leu263Val, Val422Leu, Thr1174Ser, Trp1204Arg, Pro1345Ser, Gln1489Lys, Phe1499Leu, Arg1575Cys, Val1611Phe, Leu1624Pro, Arg1648Cys, Leu1649Gln, Leu1670Trp, Gly1674Arg, and Asp1866Tyr; (b) a known pathogenic mutation in another gene that causes epilepsy, wherein the pathogenic mutation is homozygous in cases of known recessive disease; (c) currently treated with a sodium channel blocker as maintenance treatment and an anticoagulant, wherein the sodium channel blocker is phenytoin, carbamazepine, oxcarbazepine, lamotrigine, lacosamide, or rufinamide, and wherein the anticoagulant is not an aspirin; (d) clinically, significantly unstable medical conditions other than epilepsy; (e) clinically, relevant symptoms or a clinically significant illness in the 4 weeks prior to administering, other than epilepsy; (f) a history of brain or spinal cord disease other than epilepsy, Dravet Syndrome or a history of bacterial meningitis or brain malformation; (g) a spinal deformity or other condition that alters the free flow of cerebrospinal fluid (CSF) or having an implanted CSF drainage shunt; (h) clinically significant abnormal laboratory values prior to administering; (i) aspartate aminotransferase or alanine aminotransferase>2.5-fold upper limit of normal, serum creatinine>upper limit of normal or platelet count<lower limit of normal; (j) clinically relevant abnormalities in the 12-lead electrocardiogram (ECG) measured at prior to administering; (k) a psychiatric or behavioral disorder; and (l) currently or in the past 4 weeks, medication of an anticoagulant, wherein the anticoagulant is not aspirin. In some embodiments, the subject is additionally characterized by not having eight or more of the following: (a) one of the following mutations in the SCN1A gene: Thr226Met, Leu263Val, Val422Leu, Thr1174Ser, Trp1204Arg, Pro1345Ser, Gln1489Lys, Phe1499Leu, Arg1575Cys, Val1611Phe, Leu1624Pro, Arg1648Cys, Leu1649Gln, Leu1670Trp, Gly1674Arg, and Asp1866Tyr; (b) a known pathogenic mutation in another gene that causes epilepsy, wherein the pathogenic mutation is homozygous in cases of known recessive disease; (c) currently treated with a sodium channel blocker as maintenance treatment and an anticoagulant, wherein the sodium channel blocker is phenytoin, carbamazepine, oxcarbazepine, lamotrigine, lacosamide, or rufinamide, and wherein the anticoagulant is not an aspirin; (d) clinically, significantly unstable medical conditions other than epilepsy; (e) clinically, relevant symptoms or a clinically significant illness in the 4 weeks prior to administering, other than epilepsy; (f) a history of brain or spinal cord disease other than epilepsy, Dravet Syndrome or a history of bacterial meningitis or brain malformation; (g) a spinal deformity or other condition that alters the free flow of cerebrospinal fluid (CSF) or having an implanted CSF drainage shunt; (h) clinically significant abnormal laboratory values prior to administering; (i) aspartate aminotransferase or alanine aminotransferase>2.5-fold upper limit of normal, serum creatinine>upper limit of normal or platelet count<lower limit of normal; (j) clinically relevant abnormalities in the 12-lead electrocardiogram (ECG) measured at prior to administering; (k) a psychiatric or behavioral disorder; and (l) currently or in the past 4 weeks, medication of an anticoagulant, wherein the anticoagulant is not aspirin. In some embodiments, the subject is additionally characterized by not having nine or more of the following: (a) one of the following mutations in the SCN1A gene: Thr226Met, Leu263Val, Val422Leu, Thr1174Ser, Trp1204Arg, Pro1345Ser, Gln1489Lys, Phe1499Leu, Arg1575Cys, Val1611Phe, Leu1624Pro, Arg1648Cys, Leu1649Gln, Leu1670Trp, Gly1674Arg, and Asp1866Tyr; (b) a known pathogenic mutation in another gene that causes epilepsy, wherein the pathogenic mutation is homozygous in cases of known recessive disease; (c) currently treated with a sodium channel blocker as maintenance treatment and an anticoagulant, wherein the sodium channel blocker is phenytoin, carbamazepine, oxcarbazepine, lamotrigine, lacosamide, or rufinamide, and wherein the anticoagulant is not an aspirin; (d) clinically, significantly unstable medical conditions other than epilepsy; (e) clinically, relevant symptoms or a clinically significant illness in the 4 weeks prior to administering, other than epilepsy; (f) a history of brain or spinal cord disease other than epilepsy, Dravet Syndrome or a history of bacterial meningitis or brain malformation; (g) a spinal deformity or other condition that alters the free flow of cerebrospinal fluid (CSF) or having an implanted CSF drainage shunt; (h) clinically significant abnormal laboratory values prior to administering; (i) aspartate aminotransferase or alanine aminotransferase>2.5-fold upper limit of normal, serum creatinine>upper limit of normal or platelet count<lower limit of normal; (j) clinically relevant abnormalities in the 12-lead electrocardiogram (ECG) measured at prior to administering; (k) a psychiatric or behavioral disorder; and (l) currently or in the past 4 weeks, medication of an anticoagulant, wherein the anticoagulant is not aspirin. In some embodiments, the subject is additionally characterized by not having ten or more of the following: (a) one of the following mutations in the SCN1A gene: Thr226Met, Leu263Val, Val422Leu, Thr1174Ser, Trp1204Arg, Pro1345Ser, Gln1489Lys, Phe1499Leu, Arg1575Cys, Val1611Phe, Leu1624Pro, Arg1648Cys, Leu1649Gln, Leu1670Trp, Gly1674Arg, and Asp1866Tyr; (b) a known pathogenic mutation in another gene that causes epilepsy, wherein the pathogenic mutation is homozygous in cases of known recessive disease; (c) currently treated with a sodium channel blocker as maintenance treatment and an anticoagulant, wherein the sodium channel blocker is phenytoin, carbamazepine, oxcarbazepine, lamotrigine, lacosamide, or rufinamide, and wherein the anticoagulant is not an aspirin; (d) clinically, significantly unstable medical conditions other than epilepsy; (e) clinically, relevant symptoms or a clinically significant illness in the 4 weeks prior to administering, other than epilepsy; (f) a history of brain or spinal cord disease other than epilepsy, Dravet Syndrome or a history of bacterial meningitis or brain malformation; (g) a spinal deformity or other condition that alters the free flow of cerebrospinal fluid (CSF) or having an implanted CSF drainage shunt; (h) clinically significant abnormal laboratory values prior to administering; (i) aspartate aminotransferase or alanine aminotransferase>2.5-fold upper limit of normal, serum creatinine>upper limit of normal or platelet count<lower limit of normal; (j) clinically relevant abnormalities in the 12-lead electrocardiogram (ECG) measured at prior to administering; (k) a psychiatric or behavioral disorder; and (l) currently or in the past 4 weeks, medication of an anticoagulant, wherein the anticoagulant is not aspirin. In some embodiments, the subject is additionally characterized by not having eleven or more of the following: (a) one of the following mutations in the SCN1A gene: Thr226Met, Leu263Val, Val422Leu, Thr1174Ser, Trp1204Arg, Pro1345Ser, Gln1489Lys, Phe1499Leu, Arg1575Cys, Val1611Phe, Leu1624Pro, Arg1648Cys, Leu1649Gln, Leu1670Trp, Gly1674Arg, and Asp1866Tyr; (b) a known pathogenic mutation in another gene that causes epilepsy, wherein the pathogenic mutation is homozygous in cases of known recessive disease; (c) currently treated with a sodium channel blocker as maintenance treatment and an anticoagulant, wherein the sodium channel blocker is phenytoin, carbamazepine, oxcarbazepine, lamotrigine, lacosamide, or rufinamide, and wherein the anticoagulant is not an aspirin; (d) clinically, significantly unstable medical conditions other than epilepsy; (e) clinically, relevant symptoms or a clinically significant illness in the 4 weeks prior to administering, other than epilepsy; (f) a history of brain or spinal cord disease other than epilepsy, Dravet Syndrome or a history of bacterial meningitis or brain malformation; (g) a spinal deformity or other condition that alters the free flow of cerebrospinal fluid (CSF) or having an implanted CSF drainage shunt; (h) clinically significant abnormal laboratory values prior to administering; (i) aspartate aminotransferase or alanine aminotransferase>2.5-fold upper limit of normal, serum creatinine>upper limit of normal or platelet count<lower limit of normal; (j) clinically relevant abnormalities in the 12-lead electrocardiogram (ECG) measured at prior to administering; (k) a psychiatric or behavioral disorder; and (l) currently or in the past 4 weeks, medication of an anticoagulant, wherein the anticoagulant is not aspirin. In some embodiments, the subject is additionally characterized by not having all of the following: (a) one of the following mutations in the SCN1A gene: Thr226Met, Leu263Val, Val422Leu, Thr1174Ser, Trp1204Arg, Pro1345Ser, Gln1489Lys, Phe1499Leu, Arg1575Cys, Val1611Phe, Leu1624Pro, Arg1648Cys, Leu1649Gln, Leu1670Trp, Gly1674Arg, and Asp1866Tyr; (b) a known pathogenic mutation in another gene that causes epilepsy, wherein the pathogenic mutation is homozygous in cases of known recessive disease; (c) currently treated with a sodium channel blocker as maintenance treatment and an anticoagulant, wherein the sodium channel blocker is phenytoin, carbamazepine, oxcarbazepine, lamotrigine, lacosamide, or rufinamide, and wherein the anticoagulant is not an aspirin; (d) clinically, significantly unstable medical conditions other than epilepsy; (e) clinically, relevant symptoms or a clinically significant illness in the 4 weeks prior to administering, other than epilepsy; (f) a history of brain or spinal cord disease other than epilepsy, Dravet Syndrome or a history of bacterial meningitis or brain malformation; (g) a spinal deformity or other condition that alters the free flow of cerebrospinal fluid (CSF) or having an implanted CSF drainage shunt; (h) clinically significant abnormal laboratory values prior to administering; (i) aspartate aminotransferase or alanine aminotransferase>2.5-fold upper limit of normal, serum creatinine>upper limit of normal or platelet count<lower limit of normal; (j) clinically relevant abnormalities in the 12-lead electrocardiogram (ECG) measured at prior to administering; (k) a psychiatric or behavioral disorder; and (l) currently or in the past 4 weeks, medication of an anticoagulant, wherein the anticoagulant is not aspirin.

[0237] In some embodiments, the subject is additionally characterized by not having known pathogenic mutation in another gene that causes epilepsy. In some embodiments, the subject is additionally characterized by not having had clinically relevant symptoms or a clinically significant illness in the past 4 weeks other than epilepsy. In some embodiments, the subject is additionally characterized by not having specific mutations of SCN1A gene demonstrated to cause gain-of-function. In some embodiments, the subject is additionally characterized by currently not being treated with an anti-epileptic drug acting predominantly as a sodium channel blocker. In some embodiments, the subject is additionally characterized by not having clinically significant unstable medical condition(s) other than epilepsy.

[0238] In some embodiments, the subject has pediatric epilepsy, epileptic encephalopathies, refractory myoclonic epilepsy, or severe myoclonic epilepsy in infancy. In some embodiments, the subject has myoclonic epilepsies, generalized epilepsy, epilepsy, brain diseases, central nervous system diseases, nervous system diseases, or epileptic syndromes. In some embodiments, the methods of treatment as described herein comprise methods of treating or reducing the likelihood of developing a disease or condition, wherein the disease or condition is pediatric epilepsy, epileptic encephalopathies, refractory myoclonic epilepsy, or severe myoclonic epilepsy in infancy. In some embodiments, the methods of treatment as described herein comprise methods of treating or reducing the likelihood of developing a disease or condition, wherein the disease or condition is myoclonic epilepsies, generalized epilepsy, epilepsy, brain diseases, central nervous system diseases, nervous system diseases, or epileptic syndromes. In some embodiment, the subject has seizures that are not controlled by current antiepileptic drug (AED) regimen. In some embodiment, the AED regimen comprises clobazam, cannabidiol, levetiracetam, stiripentol, or valproic acid/valproate.

[0239] The term “magnetic resonance imaging lesion,” as used herein, refers to any damage or abnormal change in the tissue of an organism, caused by the magnetic resonance imaging. The term “magnetic resonance imaging,” as used herein, refers to a form of medical imaging that measures the response of the atomic nuclei of body tissues to high-frequency radio waves when placed in a strong magnetic field, and that produces images of the internal organs.

[0240] The term “ketogenic diet,” as used herein, refers to a high-fat, adequate-protein, low-carbohydrate diet that in medicine is used, for example, to treat refractory epilepsy in children. The diet forces the body to burn fats rather than carbohydrates.

[0241] The term “a vagal nerve stimulator” or “vagus nerve stimulation (VNS)” as used herein, refers to a medical treatment that involves delivering electrical impulses to the vagus nerve. It is, for example, used as an add-on treatment for certain types of intractable epilepsy and treatment-resistant depression.

[0242] The term “cannabinoid,” as used herein, refers to a chemical found in cannabis. Exemplary cannabinoids include, but are not limited to the phytocannabinoid tetrahydrocannabinol (THC) (Delta9-THC or Delta8-THC), and cannabidiol (CBD). Cannabinoids, as used herein, may be natural or synthetic chemicals.

[0243] The term “marijuana” or “cannabis,” as used herein, refers to a psychoactive drug from the Cannabis plant used primarily for medical or recreational purposes. An exemplary main psychoactive component of cannabis is tetrahydrocannabinol (THC).

[0244] The term “sodium channel blocker,” as used herein, refers to a drug which impair the conduction of sodium ions (Na+) through sodium channels. Examples of sodium channel blockers include, but are not limited to, alkaloids (e.g., saxitoxin, neosaxitoxin, tetrodotoxin), local anesthetics (e.g., lidocaine), anticonvulsants (e.g., phenytoin, oxcarbazepine (derivative of carbamazepine)), and class Ia (e.g., quinidine, procainamide and disopyramide), class Ib (e.g., lidocaine, mexiletine, tocainide, and phenytoin) and class Ic (e.g., encainide, flecainide, moricizine, and propafenone) antiarrhythmic agents.

[0245] The term “cerebrospinal fluid (CSF),” as used herein, refers to a clear, colorless body fluid found in the brain and spinal cord. CSF, for example, acts as a cushion or buffer, providing basic mechanical and immunological protection to the brain inside the skull, and plays a vital function in the cerebral autoregulation of cerebral blood flow. The term “artificial cerebrospinal fluid (aCSF),” as used herein, refers to a biological buffer solution that is commonly used as a vehicle solution for administration of agents to the central nervous system (CNS). aCSF, for instance, closely matches the electrolyte concentrations and physiological compatibility of endogenous CSF to enable a vital environment for neuronal tissue by maintaining the homeostasis, osmolarity, and pH at physiological levels.

[0246] The term “CSF drainage shunt,” as used herein, refers to a system that drains excess fluid from the brain to another part of the body where the fluid is absorbed as part of the circulatory process. CSF shunts are, for example, used to treat hydrocephalus.

[0247] The term “electrocardiogram (EKG or ECG),” as used herein, refers to a test that measures the electrical activity of the heartbeat, e.g., producing a graph of voltage versus time of the electrical activity of the heart. With each beat, an electrical impulse (or “wave”) travels through the heart.

[0248] “Aspartate transaminase (AST),” also known as aspartate aminotransferase, AspAT/ASAT/AAT, or (serum) glutamic oxaloacetic transaminase (GOT, SGOT), as used herein, refers to a pyridoxal phosphate (PLP)-dependent transaminase enzyme (EC 2.6.1.1). AST includes any of the recombinant or naturally-occurring forms of AST protein or variants or homologs thereof that maintain AST activity, (e.g., within at least 50%, 80%, 90%, 95%, 96%, 97%, 98%, 99% or 100% activity compared to AST). Exemplary AST activity includes, but are not limited to, playing a role in amino acid metabolism, for example, by catalyzing the reversible transfer of an α-amino group between aspartate and glutamate and, as such. In some aspects, the variants or homologs have at least 80%, 85%, 90%, 95%, 96%, 97%, 98%, 99% or 100% amino acid sequence identity across the whole sequence or a portion of the sequence (e.g., a 50, 100, 150 or 200 continuous amino acid portion) compared to a naturally occurring AST protein. In some embodiments, the AST protein is substantially identical to the protein identified by the UniProt reference number P17174 or a variant or homolog having substantial identity thereto. In some embodiments, the AST protein is substantially identical to the protein identified by the UniProt reference number P00505 or a variant or homolog having substantial identity thereto.

[0249] “Alanine transaminase (ALT),” also known as alanine aminotransferase (ALAT), serum glutamate-pyruvate transaminase (SGPT), or serum glutamic-pyruvic transaminase (SGPT), as used herein, refers to a transaminase enzyme (EC 2.6.1.2). ALT includes any of the recombinant or naturally-occurring forms of ALT protein or variants or homologs thereof that maintain ALT activity, (e.g., within at least 50%, 80%, 90%, 95%, 96%, 97%, 98%, 99% or 100% activity compared to ALT). Exemplary ALT activity includes, but are not limited to, catalyzing the two parts of the alanine cycle. In some aspects, the variants or homologs have at least 80%, 85%, 90%, 95%, 96%, 97%, 98%, 99% or 100% amino acid sequence identity across the whole sequence or a portion of the sequence (e.g., a 50, 100, 150 or 200 continuous amino acid portion) compared to a naturally occurring ALT protein. In some embodiments, the ALT protein is substantially identical to the protein identified by the UniProt reference number P24298 or a variant or homolog having substantial identity thereto.

[0250] In some embodiments, serum AST level, serum ALT level, and their ratio (AST/ALT ratio) are measured clinically as biomarkers for liver health.

[0251] The term “laboratory vale,” as used herein refers to the value obtained by laboratory tests or measurements. Exemplary, non-limiting laboratory tests or measurements may be related to hematology, coagulation, clinical chemistry, plasma, urinalysis, serum, serum or urine pregnancy, urine, or cerebrospinal fluid.

### Therapeutic Schedule

[0252] In some embodiments, the first dose is a single dose. In some embodiments, the first dose is the first of multiple doses. In some embodiments, the method further comprises assessing tolerability or effectiveness of the pharmaceutical composition.

[0253] In some embodiments, the method as described herein further comprises administering to the human subject a pharmaceutical composition comprising the ASO as described herein at a subsequent dose of 0.1, 0.5, 1, 2.5, 5, 6, 7, 8, 9, 10, 11, 12, 13, 14, 15, 16, 17, 18, 19, 20, 25, 30, 35, 40, 45, 50, 55, 60, 65, 70, 75, 80, 85, 90, 95, 100, 105, 110, 115, 120, 125, 130, 135, 140, 145, 150, 155, 160, 165, 170, 175, 180, 185, 190, 195, or 200 mg.

[0254] In some embodiments, the method as described herein further comprises administering to the human subject a pharmaceutical composition comprising the ASO as described herein at a subsequent dose of from about 0.1 to about 1000 mg, from about 0.2 to about 1000 mg, from about 0.3 to about 1000 mg, from about 0.4 to about 1000 mg, from about 0.5 to about 1000 mg, from about 0.6 to about 1000 mg, from about 0.7 to about 1000 mg, from about 0.8 to about 1000 mg, from about 0.9 to about 1000 mg, 1 to about 1000 mg, from about 2 to about 1000 mg, from about 3 to about 1000 mg, from about 4 to about 1000 mg, from about 5 to about 1000 mg, from about 6 to about 1000 mg, from about 7 to about 1000 mg, from about 8 to about 1000 mg, from about 9 to about 1000 mg, from about 10 to about 1000 mg, from about 15 to about 1000 mg, from about 20 to about 1000 mg, from about 25 to about 1000 mg, from about 30 to about 1000 mg, from about 35 to about 1000 mg, from about 40 to about 1000 mg, from about 45 to about 1000 mg, from about 50 to about 1000 mg, from about 55 to about 1000 mg, from about 60 to about 1000 mg, from about 65 to about 1000 mg, from about 70 to about 1000 mg, from about 75 to about 1000 mg, from about 80 to about 1000 mg, from about 85 to about 1000 mg, from about 90 to about 1000 mg, from about 95 to about 1000 mg, from about 100 to about 1000 mg, from about 150 to about 1000 mg, from about 200 to about 1000 mg, from about 250 to about 1000 mg, from about 300 to about 1000 mg, from about 350 to about 1000 mg, from about 400 to about 1000 mg, from about 450 to about 1000 mg, from about 500 to about 1000 mg, from about 550 to about 1000 mg, from about 600 to about 1000 mg, from about 650 to about 1000 mg, from about 700 to about 1000 mg, from about 750 to about 1000 mg, from about 800 to about 1000 mg, from about 850 to about 1000 mg, from about 900 to about 1000 mg, or from about 950 to about 1000 mg.

[0255] In some embodiments, the method as described herein further comprises administering to the human subject a pharmaceutical composition comprising the ASO as described herein at a subsequent dose of from 0.1 to 1000 mg, from 0.2 to 1000 mg, from 0.3 to 1000 mg, from 0.4 to 1000 mg, from 0.5 to 1000 mg, from 0.6 to 1000 mg, from 0.7 to 1000 mg, from 0.8 to 1000 mg, from 0.9 to 1000 mg, 1 to 1000 mg, from 2 to 1000 mg, from 3 to 1000 mg, from 4 to 1000 mg, from 5 to 1000 mg, from 6 to 1000 mg, from 7 to 1000 mg, from 8 to 1000 mg, from 9 to 1000 mg, from 10 to 1000 mg, from 15 to 1000 mg, from 20 to 1000 mg, from 25 to 1000 mg, from 30 to 1000 mg, from 35 to 1000 mg, from 40 to 1000 mg, from 45 to 1000 mg, from 50 to 1000 mg, from 55 to 1000 mg, from 60 to 1000 mg, from 65 to 1000 mg, from 70 to 1000 mg, from 75 to 1000 mg, from 80 to 1000 mg, from 85 to 1000 mg, from 90 to 1000 mg, from 95 to 1000 mg, from 100 to 1000 mg, from 150 to 1000 mg, from 200 to 1000 mg, from 250 to 1000 mg, from 300 to 1000 mg, from 350 to 1000 mg, from 400 to 1000 mg, from 450 to 1000 mg, from 500 to 1000 mg, from 550 to 1000 mg, from 600 to 1000 mg, from 650 to 1000 mg, from 700 to 1000 mg, from 750 to 1000 mg, from 800 to 1000 mg, from 850 to 1000 mg, from 900 to 1000 mg, or from 950 to 1000 mg.

[0256] In some embodiments, the method as described herein further comprises administering to the human subject a pharmaceutical composition comprising the ASO as described herein at a subsequent dose of from about 0.1 to about 950 mg, from about 0.1 to about 900 mg, from about 0.1 to about 850 mg, from about 0.1 to about 800 mg, from about 0.1 to about 750 mg, from about 0.1 to about 700 mg, from about 0.1 to about 650 mg, from about 0.1 to about 600 mg, from about 0.1 to about 550 mg, from about 0.1 to about 500 mg, from about 0.1 to about 450 mg, from about 0.1 to about 400 mg, from about 0.1 to about 350 mg, from about 0.1 to about 300 mg, from about 0.1 to about 250 mg, from about 0.1 to about 200 mg, from about 0.1 to about 150 mg, from about 0.1 to about 100 mg, from about 0.1 to about 95 mg, from about 0.1 to about 90 mg, from about 0.1 to about 85 mg, from about 0.1 to about 80 mg, from about 0.1 to about 75 mg, from about 0.1 to about 70 mg, from about 0.1 to about 65 mg, from about 0.1 to about 60 mg, from about 0.1 to about 55 mg, from about 0.1 to about 50 mg, from about 0.1 to about 45 mg, from about 0.1 to about 40 mg, from about 0.1 to about 35 mg, from about 0.1 to about 30 mg, from about 0.1 to about mg, from about 0.1 to about 25 mg, from about 0.1 to about 20 mg, from about 0.1 to about 10 mg, from about 0.1 to about 9 mg, from about 0.1 to about 8 mg, from about 0.1 to about 7 mg, from about 0.1 to about 6 mg, from about 0.1 to about 5 mg, from about 0.1 to about 4 mg, from about 0.1 to about 3, from about 0.1 to about 2 mg, from about 0.1 to about 1 mg, from about 0.1 to about 0.9 mg, from about 0.1 to about 0.8 mg, from about 0.1 to about 0.7 mg, from about 0.1 to about 0.6 mg, from about 0.1 to about 0.5 mg, from about 0.1 to about 0.4 mg, from about 0.1 to about 0.3, or from about 0.1 to about 0.2 mg.

[0257] In some embodiments, the method as described herein further comprises administering to the human subject a pharmaceutical composition comprising the ASO as described herein at a subsequent dose of from 0.1 to 950 mg, from 0.1 to 900 mg, from 0.1 to 850 mg, from 0.1 to 800 mg, from 0.1 to 750 mg, from 0.1 to 700 mg, from 0.1 to 650 mg, from 0.1 to 600 mg, from 0.1 to 550 mg, from 0.1 to 500 mg, from 0.1 to 450 mg, from 0.1 to 400 mg, from 0.1 to 350 mg, from 0.1 to 300 mg, from 0.1 to 250 mg, from 0.1 to 200 mg, from 0.1 to 150 mg, from 0.1 to 100 mg, from 0.1 to 95 mg, from 0.1 to 90 mg, from 0.1 to 85 mg, from 0.1 to 80 mg, from 0.1 to 75 mg, from 0.1 to 70 mg, from 0.1 to 65 mg, from 0.1 to 60 mg, from 0.1 to 55 mg, from 0.1 to 50 mg, from 0.1 to 45 mg, from 0.1 to 40 mg, from 0.1 to 35 mg, from 0.1 to 30 mg, from 0.1 to mg, from 0.1 to 25 mg, from 0.1 to 20 mg, from 0.1 to 10 mg, from 0.1 to 9 mg, from 0.1 to 8 mg, from 0.1 to 7 mg, from 0.1 to 6 mg, from 0.1 to 5 mg, from 0.1 to 4 mg, from 0.1 to 3, from 0.1 to 2 mg, from 0.1 to 1 mg, from 0.1 to 0.9 mg, from 0.1 to 0.8 mg, from 0.1 to 0.7 mg, from 0.1 to 0.6 mg, from 0.1 to 0.5 mg, from 0.1 to 0.4 mg, from 0.1 to 0.3, or from 0.1 to 0.2 mg.

[0258] In some embodiments, the method as described herein further comprises administering to the human subject a pharmaceutical composition comprising the ASO as described herein at a subsequent dose of from about 1 to about 400 mg, from about 2 to about 400 mg, from about 3 to about 400 mg, from about 4 to about 400 mg, from about 5 to about 400 mg, from about 6 to about 400 mg, from about 7 to about 400 mg, from about 8 to about 400 mg, from about 9 to about 400 mg, from about 10 to about 400 mg, from about 20 to about 400 mg, from about 30 to about 400 mg, from about 40 to about 400 mg, from about 50 to about 400 mg, from about 60 to about 400 mg, from about 70 to about 400 mg, from about 80 to about 400 mg, from about 90 to about 400 mg, from about 100 to about 400 mg, from about 110 to about 400 mg, from about 120 to about 400 mg, from about 130 to about 400 mg, from about 140 to about 400 mg, from about 150 to about 400 mg, from about 160 to about 400 mg, from about 170 to about 400 mg, from about 180 to about 400 mg, from about 190 to about 400 mg, from about 200 to about 400 mg, from about 210 to about 400 mg, from about 220 to about 400 mg, from about 230 to about 400 mg, from about 240 to about 400 mg, from about 250 to about 400 mg, from about 260 to about 400 mg, from about 270 to about 400 mg, from about 280 to about 400 mg, from about 290 to about 400 mg, from about 300 to about 400 mg, from about 310 to about 400 mg, from about 320 to about 400 mg, from about 330 to about 400 mg, from about 340 to about 400 mg, from about 350 to about 400 mg, from about 360 to about 400 mg, from about 370 to about 400 mg, from about 380 to about 400 mg, or from about 390 to about 400 mg.

[0259] In some embodiments, the method as described herein further comprises administering to the human subject a pharmaceutical composition comprising the ASO as described herein at a subsequent dose of from 1 to 400 mg, from 2 to 400 mg, from 3 to 400 mg, from 4 to 400 mg, from 5 to 400 mg, from 6 to 400 mg, from 7 to 400 mg, from 8 to 400 mg, from 9 to 400 mg, from 10 to 400 mg, from 20 to 400 mg, from 30 to 400 mg, from 40 to 400 mg, from 50 to 400 mg, from 60 to 400 mg, from 70 to 400 mg, from 80 to 400 mg, from 90 to 400 mg, from 100 to 400 mg, from 110 to 400 mg, from 120 to 400 mg, from 130 to 400 mg, from about 140 to 400 mg, from 150 to 400 mg, from about 160 to 400 mg, from 170 to 400 mg, from 180 to 400 mg, from 190 to 400 mg, from 200 to 400 mg, from 210 to 400 mg, from 220 to 400 mg, from 230 to 400 mg, from 240 to 400 mg, from 250 to 400 mg, from 260 to 400 mg, from 270 to 400 mg, from 280 to 400 mg, from 290 to 400 mg, from 300 to 400 mg, from 310 to 400 mg, from 320 to 400 mg, from 330 to 400 mg, from 340 to 400 mg, from 350 to 400 mg, from 360 to 400 mg, from 370 to 400 mg, from 380 to 400 mg, or from 390 to 400 mg.

[0260] In some embodiments, the method as described herein further comprises administering to the human subject a pharmaceutical composition comprising the ASO as described herein at a subsequent dose of from about 10 to about 390 mg, from about 10 to about 380 mg, from about 10 to about 370 mg, from about 10 to about 360 mg, from about 10 to about 350 mg, from about 10 to about 340 mg, from about 10 to about 330 mg, from about 10 to about 320 mg, from about 10 to about 310 mg, from about 10 to about 300 mg, from about 10 to about 290 mg, from about 10 to about 280 mg, from about 10 to about 270 mg, from about 10 to about 260 mg, from about 10 to about 250 mg, from about 10 to about 240 mg, from about 10 to about 230 mg, from about 10 to about 220 mg, from about 10 to about 210 mg, from about 10 to about 200 mg, from about 10 to about 190 mg, from about 10 to about 180 mg, from about 10 to about 170 mg, from about 10 to about 160 mg, from about 10 to about 150 mg, from about 10 to about 140 mg, from about 10 to about 130 mg, from about 10 to about 120 mg, from about 10 to about 110 mg, from about 10 to about 90 mg, from about 10 to about 80 mg, from about 10 to about 70 mg, from about 10 to about 60 mg, from about 10 to about 50 mg, from about 10 to about 40 mg, from about 10 to about 30 mg, or from about 10 to about 20 mg.

[0261] In some embodiments, the method as described herein further comprises administering to the human subject a pharmaceutical composition comprising the ASO as described herein at a subsequent dose of from 10 to 390 mg, from 10 to 380 mg, from 10 to 370 mg, from 10 to 360 mg, from 10 to 350 mg, from 10 to 340 mg, from 10 to 330 mg, from 10 to 320 mg, from 10 to 310 mg, from 10 to 300 mg, from 10 to 290 mg, from 10 to 280 mg, from 10 to 270 mg, from 10 to 260 mg, from 10 to 250 mg, from 10 to 240 mg, from 10 to 230 mg, from 10 to 220 mg, from 10 to 210 mg, from 10 to 200 mg, from 10 to 190 mg, from 10 to 180 mg, from 10 to 170 mg, from 10 to 160 mg, from 10 to 150 mg, from 10 to 140 mg, from 10 to 130 mg, from 10 to 120 mg, from 10 to 110 mg, from 10 to 90 mg, from 10 to 80 mg, from 10 to 70 mg, from 10 to 60 mg, from 10 to 50 mg, from 10 to 40 mg, from 10 to 30 mg, or from 10 to 20 mg.

[0262] In some embodiments mg, the method as described herein further comprises administering to the human subject a pharmaceutical composition comprising the ASO as described herein at a subsequent dose of about 1 mg, about 2 mg, about 3 mg, about 4 mg, about 5 mg, about 6 mg, about 7 mg, about 8 mg, about 9 mg, about 10 mg, about 11 mg, about 12 mg, about 13 mg, about 14 mg, about 15 mg, about 16 mg, about 17 mg, about 18 mg, about 19 mg, about 20 mg, about 21 mg, about 22 mg, about 23 mg, about 24 mg, about 25 mg, about 26 mg, about 27 mg, about 28 mg, about 29 mg, about 30 mg, about 31 mg, about 32 mg, about 33 mg, about 34 mg, about 35 mg, about 36 mg, about 37 mg, about 38 mg, about 39 mg, about 40 mg, about 41 mg, about 42 mg, about 43 mg, about 44 mg, about 45 mg, about 46 mg, about 47 mg, about 48 mg, about 49 mg, about 50 mg, about 51 mg, about 52 mg, about 53 mg, about 54 mg, about 55 mg, about 56 mg, about 57 mg, about 58 mg, about 59 mg, about 60 mg, about 61 mg, about 62 mg, about 63 mg, about 64 mg, about 65 mg, about 66 mg, about 67 mg, about 68 mg, about 69 mg, about 70 mg, about 71 mg, about 72 mg, about 73 mg, about 74 mg, about 75 mg, about 76 mg, about 77 mg, about 78 mg, about 79 mg, about 80 mg, about 81 mg, about 82 mg, about 83 mg, about 84 mg, about 85 mg, about 86 mg, about 87 mg, about 88 mg, about 89 mg, about 90 mg, about 91 mg, about 92 mg, about 93 mg, about 94 mg, about 95 mg, about 96 mg, about 97 mg, about 98 mg, about 99 mg, about 100 mg, about 101 mg, about 102 mg, about 103 mg, about 104 mg, about 105 mg, about 106 mg, about 107 mg, about 108 mg, about 109 mg, about 110 mg, about 111 mg, about 112 mg, about 113 mg, about 114 mg, about 115 mg, about 116 mg, about 117 mg, about 118 mg, about 119 mg, about 120 mg, about 121 mg, about 122 mg, about 123 mg, about 124 mg, about 125 mg, about 126 mg, about 127 mg, about 128 mg, about 129 mg, about 130 mg, about 131 mg, about 132 mg, about 133 mg, about 134 mg, about 135 mg, about 136 mg, about 137 mg, about 138 mg, about 139 mg, about 140 mg, about 141 mg, about 142 mg, about 143 mg, about 144 mg, about 145 mg, about 146 mg, about 147 mg, about 148 mg, about 149 mg, about 150 mg, about 151 mg, about 152 mg, about 153 mg, about 154 mg, about 155 mg, about 156 mg, about 157 mg, about 158 mg, about 159 mg, about 160 mg, about 161 mg, about 162 mg, about 163 mg, about 164 mg, about 165 mg, about 166 mg, about 167 mg, about 168 mg, about 169 mg, about 170 mg, about 171 mg, about 172 mg, about 173 mg, about 174 mg, about 175 mg, about 176 mg, about 177 mg, about 178 mg, about 179 mg, about 180 mg, about 181 mg, about 182 mg, about 183 mg, about 184 mg, about 185 mg, about 186 mg, about 187 mg, about 188 mg, about 189 mg, about 190 mg, about 191 mg, about 192 mg, about 193 mg, about 194 mg, about 195 mg, about 196 mg, about 197 mg, about 198 mg, about 199 mg, about 200 mg, about 201 mg, about 202 mg, about 203 mg, about 204 mg, about 205 mg, about 206 mg, about 207 mg, about 208 mg, about 209 mg, about 210 mg, about 211 mg, about 212 mg, about 213 mg, about 214 mg, about 215 mg, about 216 mg, about 217 mg, about 218 mg, about 219 mg, about 220 mg, about 221 mg, about 222 mg, about 223 mg, about 224 mg, about 225 mg, about 226 mg, about 227 mg, about 228 mg, about 229 mg, about 230 mg, about 231 mg, about 232 mg, about 233 mg, about 234 mg, about 235 mg, about 236 mg, about 237 mg, about 238 mg, about 239 mg, about 240 mg, about 241 mg, about 242 mg, about 243 mg, about 244 mg, about 245 mg, about 246 mg, about 247 mg, about 248 mg, about 249 mg, about 250 mg, about 251 mg, about 252 mg, about 253 mg, about 254 mg, about 255 mg, about 256 mg, about 257 mg, about 258 mg, about 259 mg, about 260 mg, about 261 mg, about 262 mg, about 263 mg, about 264 mg, about 265 mg, about 266 mg, about 267 mg, about 268 mg, about 269 mg, about 270 mg, about 271 mg, about 272 mg, about 273 mg, about 274 mg, about 275 mg, about 276 mg, about 277 mg, about 278 mg, about 279 mg, about 280 mg, about 281 mg, about 282 mg, about 283 mg, about 284 mg, about 285 mg, about 286 mg, about 287 mg, about 288 mg, about 289 mg, about 290 mg, about 291 mg, about 292 mg, about 293 mg, about 294 mg, about 295 mg, about 296 mg, about 297 mg, about 298 mg, about 299 mg, about 300 mg, about 301 mg, about 302 mg, about 303 mg, about 304 mg, about 305 mg, about 306 mg, about 307 mg, about 308 mg, about 309 mg, about 310 mg, about 311 mg, about 312 mg, about 313 mg, about 314 mg, about 315 mg, about 316 mg, about 317 mg, about 318 mg, about 319 mg, about 320 mg, about 321 mg, about 322 mg, about 323 mg, about 324 mg, about 325 mg, about 326 mg, about 327 mg, about 328 mg, about 329 mg, about 330 mg, about 331 mg, about 332 mg, about 333 mg, about 334 mg, about 335 mg, about 336 mg, about 337 mg, about 338 mg, about 339 mg, about 340 mg, about 341 mg, about 342 mg, about 343 mg, about 344 mg, about 345 mg, about 346 mg, about 347 mg, about 348 mg, about 349 mg, about 350 mg, about 351 mg, about 352 mg, about 353 mg, about 354 mg, about 355 mg, about 356 mg, about 357 mg, about 358 mg, about 359 mg, about 360 mg, about 361 mg, about 362 mg, about 363 mg, about 364 mg, about 365 mg, about 366 mg, about 367 mg, about 368 mg, about 369 mg, about 370 mg, about 371 mg, about 372 mg, about 373 mg, about 374 mg, about 375 mg, about 376 mg, about 377 mg, about 378 mg, about 379 mg, about 380 mg, about 381 mg, about 382 mg, about 383 mg, about 384 mg, about 385 mg, about 386 mg, about 387 mg, about 388 mg, about 389 mg, about 390 mg, about 391 mg, about 392 mg, about 393 mg, about 394 mg, about 395 mg, about 396 mg, about 397 mg, about 398 mg, about 399 mg, or 400 mg.

[0263] In some embodiments mg, the method as described herein further comprises administering to the human subject a pharmaceutical composition comprising the ASO as described herein at a subsequent dose of 1 mg, 2 mg, 3 mg, 4 mg, 5 mg, 6 mg, 7 mg, 8 mg, 9 mg, 10 mg, 11 mg, 12 mg, 13 mg, 14 mg, 15 mg, 16 mg, 17 mg, 18 mg, 19 mg, 20 mg, 21 mg, 22 mg, 23 mg, 24 mg, 25 mg, 26 mg, 27 mg, 28 mg, 29 mg, 30 mg, 31 mg, 32 mg, 33 mg, 34 mg, 35 mg, 36 mg, 37 mg, 38 mg, 39 mg, 40 mg, 41 mg, 42 mg, 43 mg, 44 mg, 45 mg, 46 mg, 47 mg, 48 mg, 49 mg, 50 mg, 51 mg, 52 mg, 53 mg, 54 mg, 55 mg, 56 mg, 57 mg, 58 mg, 59 mg, 60 mg, 61 mg, 62 mg, 63 mg, 64 mg, 65 mg, 66 mg, 67 mg, 68 mg, 69 mg, 70 mg, 71 mg, 72 mg, 73 mg, 74 mg, 75 mg, 76 mg, 77 mg, 78 mg, 79 mg, 80 mg, 81 mg, 82 mg, 83 mg, 84 mg, 85 mg, 86 mg, 87 mg, 88 mg, 89 mg, 90 mg, 91 mg, 92 mg, 93 mg, 94 mg, 95 mg, 96 mg, 97 mg, 98 mg, 99 mg, 100 mg, 101 mg, 102 mg, 103 mg, 104 mg, 105 mg, 106 mg, 107 mg, 108 mg, 109 mg, 110 mg, 111 mg, 112 mg, 113 mg, 114 mg, 115 mg, 116 mg, 117 mg, 118 mg, 119 mg, 120 mg, 121 mg, 122 mg, 123 mg, 124 mg, 125 mg, 126 mg, 127 mg, 128 mg, 129 mg, 130 mg, 131 mg, 132 mg, 133 mg, 134 mg, 135 mg, 136 mg, 137 mg, 138 mg, 139 mg, 140 mg, 141 mg, 142 mg, 143 mg, 144 mg, 145 mg, 146 mg, 147 mg, 148 mg, 149 mg, 150 mg, 151 mg, 152 mg, 153 mg, 154 mg, 155 mg, 156 mg, 157 mg, 158 mg, 159 mg, 160 mg, 161 mg, 162 mg, 163 mg, 164 mg, 165 mg, 166 mg, 167 mg, 168 mg, 169 mg, 170 mg, 171 mg, 172 mg, 173 mg, 174 mg, 175 mg, 176 mg, 177 mg, 178 mg, 179 mg, 180 mg, 181 mg, 182 mg, 183 mg, 184 mg, 185 mg, 186 mg, 187 mg, 188 mg, 189 mg, 190 mg, 191 mg, 192 mg, 193 mg, 194 mg, 195 mg, 196 mg, 197 mg, 198 mg, 199 mg, 200 mg, 201 mg, 202 mg, 203 mg, 204 mg, 205 mg, 206 mg, 207 mg, 208 mg, 209 mg, 210 mg, 211 mg, 212 mg, 213 mg, 214 mg, 215 mg, 216 mg, 217 mg, 218 mg, 219 mg, 220 mg, 221 mg, 222 mg, 223 mg, 224 mg, 225 mg, 226 mg, 227 mg, 228 mg, 229 mg, 230 mg, 231 mg, 232 mg, 233 mg, 234 mg, 235 mg, 236 mg, 237 mg, 238 mg, 239 mg, 240 mg, 241 mg, 242 mg, 243 mg, 244 mg, 245 mg, 246 mg, 247 mg, 248 mg, 249 mg, 250 mg, 251 mg, 252 mg, 253 mg, 254 mg, 255 mg, 256 mg, 257 mg, 258 mg, 259 mg, 260 mg, 261 mg, 262 mg, 263 mg, 264 mg, 265 mg, 266 mg, 267 mg, 268 mg, 269 mg, 270 mg, 271 mg, 272 mg, 273 mg, 274 mg, 275 mg, 276 mg, 277 mg, 278 mg, 279 mg, 280 mg, 281 mg, 282 mg, 283 mg, 284 mg, 285 mg, 286 mg, 287 mg, 288 mg, 289 mg, 290 mg, 291 mg, 292 mg, 293 mg, 294 mg, 295 mg, 296 mg, 297 mg, 298 mg, 299 mg, 300 mg, 301 mg, 302 mg, 303 mg, 304 mg, 305 mg, 306 mg, 307 mg, 308 mg, 309 mg, 310 mg, 311 mg, 312 mg, 313 mg, 314 mg, 315 mg, 316 mg, 317 mg, 318 mg, 319 mg, 320 mg, 321 mg, 322 mg, 323 mg, 324 mg, 325 mg, 326 mg, 327 mg, 328 mg, 329 mg, 330 mg, 331 mg, 332 mg, 333 mg, 334 mg, 335 mg, 336 mg, 337 mg, 338 mg, 339 mg, 340 mg, 341 mg, 342 mg, 343 mg, 344 mg, 345 mg, 346 mg, 347 mg, 348 mg, 349 mg, 350 mg, 351 mg, 352 mg, 353 mg, 354 mg, 355 mg, 356 mg, 357 mg, 358 mg, 359 mg, 360 mg, 361 mg, 362 mg, 363 mg, 364 mg, 365 mg, 366 mg, 367 mg, 368 mg, 369 mg, 370 mg, 371 mg, 372 mg, 373 mg, 374 mg, 375 mg, 376 mg, 377 mg, 378 mg, 379 mg, 380 mg, 381 mg, 382 mg, 383 mg, 384 mg, 385 mg, 386 mg, 387 mg, 388 mg, 389 mg, 390 mg, 391 mg, 392 mg, 393 mg, 394 mg, 395 mg, 396 mg, 397 mg, 398 mg, 399 mg, or 400 mg

[0264] In some embodiments, the method as described herein further comprises assessing tolerability or effectiveness of the pharmaceutical composition. In some embodiments, the subsequent dose is lower than the previous dose following an indication that administration of the previous dose is not tolerated. In some embodiments, the subsequent dose is the same as the previous dose following an indication that administration of the previous dose is effective. In some embodiments, the subsequent dose is lower than the previous dose following an indication that administration of the previous dose is effective. In some embodiments, the subsequent dose is higher than the previous dose following an indication that administration of the previous dose is not effective.

[0265] In some embodiments, the subsequent doses are administered at least 1, 2, 3, 4, 5, 6, 7, 8, 9, 10, 11, or 12 months after administration of the previous dose.

[0266] In some embodiments, the subsequent doses are administered at least 1, 2, 3, 4, 5, 6, 7, 8, 9, 10, 11, 12, 13, 14, 15, 16, 17, 18, 19, 20, 21, 22, 23, 24, 25, 26, 27, 28, 29, or 30 hours after administration of the previous dose. In some embodiments, the subsequent doses are administered at least 1, 2, 3, 4, 5, 6, 7, 8, 9, 10, 11, 12, 13, 14, 15, 16, 17, 18, 19, 20, 21, 22, 23, 24, 25, 26, 27, 28, 29, or 30 days after administration of the previous dose. In some embodiments, the subsequent doses are administered at least 1, 2, 3, 4, 5, 6, 7, 8, 9, 10, 11, 12, 13, 14, 15, 16, 17, 18, 19, 20, 21, 22, 23, 24, 25, 26, 27, 28, 29, 30, 31, 32, 33, 34, 35, or 36 weeks after administration of the previous dose. In some embodiments, the subsequent doses are administered at least 1, 2, 3, 4, 5, 6, 7, 8, 9, 10, 11, 12, 13, 14, 15, 16, 17, 18, 19, 20, 21, 22, 23, 24, 25, 26, 27, 28, 29, 30, 31, 32, 33, 34, 35, or 36 months after administration of the previous dose. In some embodiments, the subsequent doses are administered at least 1, 2, 3, 4, 5, 6, 7, 8, 9 or 10 years after administration of the previous dose.

[0267] In some embodiments, the subsequent doses are administered at the same interval. For example, every subsequent dose is administered at the interval of 1, 2, 3, 4, 5, 6, 7, 8, 9, 10, 11, 12, 13, 14, 15, 16, 17, 18, 19, 20, 21, 22, 23, 24, 25, 26, 27, 28, 29, or 30 hours after administration of the previous dose. In some embodiments, every subsequent dose is administered at the interval of 1, 2, 3, 4, 5, 6, 7, 8, 9, 10, 11, 12, 13, 14, 15, 16, 17, 18, 19, 20, 21, 22, 23, 24, 25, 26, 27, 28, 29, or 30 days after administration of the previous dose. In some embodiments, every subsequent dose is administered at the interval of 1, 2, 3, 4, 5, 6, 7, 8, 9, 10, 11, 12, 13, 14, 15, 16, 17, 18, 19, 20, 21, 22, 23, 24, 25, 26, 27, 28, 29, 30, 31, 32, 33, 34, 35, or 36 weeks after administration of the previous dose. In some embodiments, every subsequent dose is administered at the interval of 1, 2, 3, 4, 5, 6, 7, 8, 9, 10, 11, 12, 13, 14, 15, 16, 17, 18, 19, 20, 21, 22, 23, 24, 25, 26, 27, 28, 29, 30, 31, 32, 33, 34, 35, or 36 months after administration of the previous dose.

[0268] In some embodiments, the subsequent doses are administered at the different intervals.

[0269] In some embodiments, the dose frequency is maintained or reduced following an indication that the previous dose is effective. In some embodiments, the dose frequency is increased following an indication that the previous dose is not effective. In some embodiments, the method further comprises administrating at least one additional therapeutic agent or therapy. In some embodiments, the at least one additional therapeutic agent or therapy is administered at the same time as the dose. In some embodiments, the at least one additional therapeutic agent or therapy is administered prior to administration of the dose. In some embodiments, the at least one additional therapeutic agent or therapy is administered after administration of the dose.

### Dravet Syndrome and Other Related Diseases

[0270] The terms “condition,” “diseases,” and “disorders” are used herein interchangeably in its broadest sense and include susceptibilities. In some embodiments, the disease or condition is Dravet Syndrome. In some embodiments, the method reduces or ameliorates at least one symptom of Dravet Syndrome in the human subject. In some embodiments, the symptom of Dravet Syndrome is a seizure. In some embodiments, the administration reduces or ameliorates seizure frequency, seizure intensity, or seizure duration.

[0271] Dravet syndrome (DS), otherwise known as severe myoclonic epilepsy of infancy (SMEI), is an epileptic encephalopathy presenting in the first year of life. Dravet syndrome is an increasingly recognized epileptic encephalopathy in which the clinical diagnosis is supported by the finding of sodium channel gene mutations in approximately 70-80% of patients. DS is a severe and progressive developmental and epileptic encephalopathy that is characterized by high seizure frequency and severity, intellectual disability, and a high risk of sudden unexpected death in epilepsy. Mutations of ion channel genes play a major role in the pathogenesis of a range of epilepsy syndromes, resulting in some epilepsies being regarded as channelopathies. Voltage-gated sodium channels (VGSCs) play an essential role in neuronal excitability; therefore, it is not surprising that many mutations associated with DS have been identified in the gene encoding a VGSC subunit. The disease is described by, e.g., Mulley, et al., 2005, and the disease description at OMIM #607208 (Online Mendelian Inheritance in Man, Johns Hopkins University, 1966-2015), both incorporated by reference herein.

[0272] Between 70% and 80% of patients carry sodium channel al subunit gene (SCN1A) abnormalities, and truncating mutations account for about 40%, and have a significant correlation with an earlier age of seizures onset. Sequencing mutations are found in about 70% of cases and comprise truncating (40%) and missense mutations (40%) with the remaining being splice-site changes. Most mutations are de novo, but familial mutations occur in 5-10% of cases and are usually missense in nature. The remaining SCN1A mutations comprise splice-site and missense mutations, most of which fall into the pore-forming region of the sodium channel. At present, over 500 mutations have been associated with DS and are randomly distributed along the gene (Mulley, et al., Neurol. 2006, 67, 1094-1095).

[0273] The SCN1A gene is located in the cluster of sodium channel genes on human chromosome 2q24 and encodes the α-pore forming subunits known as Na_{V}1.1 of the neuronal voltage gated sodium channel. The SCN1A gene spans approximately 100 kb of genomic DNA and comprises 26 exons. The Na_{V}1.1 protein consists of four domains, each with six-transmembrane segments. Two splice variants have been identified that result in a long and short isoform that differ in the presence or absence of 11 amino acids in the cytoplasmic loop between domains 1 and 2, in exon 11 (Miller, et al., 1993-2015, and Mulley, et al., 2005, 25, 535-542, of which entire content is incorporated herein by reference). In some aspects, the variants or homologs have at least 80%, 85%, 90%, 95%, 96%, 97%, 98%, 99% or 100% nucleotide sequence identity across the whole sequence or a portion of the sequence (e.g., a 50, 100, 150 or 200 continuous nucleotide portion) compared to a naturally occurring SCN1A gene. In some embodiments, the SCN1A gene is substantially identical to the gene identified by the Ensembl reference number ENSG00000144285 or a variant or homolog having substantial identity thereto.

[0274] Alternative splicing events in SCN1A gene can lead to non-productive mRNA transcripts which in turn can lead to aberrant protein expression, and therapeutic agents which can target the alternative splicing events in SCN1A gene can modulate the expression level of functional proteins in DS patients and/or inhibit aberrant protein expression. Such therapeutic agents can be used to treat a condition caused by Na_{V}1.1 protein deficiency.

[0275] One of the alternative splicing events that can lead to non-productive mRNA transcripts is the inclusion of an extra exon in the mRNA transcript that can induce non-sense mediated mRNA decay. The present disclosure provides compositions and methods for modulating alternative splicing of SCN1A to increase the production of protein-coding mature mRNA, and thus, translated functional Na_{V}1.1 protein. These compositions and methods include antisense oligomers (ASOs) that can cause exon skipping and promote constitutive splicing of SCN1A pre-mRNA. In various embodiments, functional Na_{V}1.1 protein can be increased using the methods of the disclosure to treat a condition caused by Na_{V}1.1 protein deficiency.

[0276] In some cases, the disease or condition is SMEB.

[0277] In some cases, the disease or condition is GEFS+.

[0278] In some cases, the disease or condition is a Febrile seizure (e.g., Febrile seizures, familial, 3A).

[0279] In some cases, the disease or condition is autism (also known as autism spectrum disorder or ASD).

[0280] In some cases, the disease or condition is migraine (e.g., migraine, familial hemiplegic, 3).

[0281] In some cases, the disease or condition is Alzheimer's disease.

[0282] In some embodiments, the disease or condition is SMEB. In some embodiments, the disease or condition is GEFS+. In some embodiments, the disease or condition is a Febrile seizure (e.g., Febrile seizures, familial, 3A). In some embodiments, the disease or condition is autism (also known as autism spectrum disorder or ASD). In some embodiments, the disease or condition is migraine (e.g., migraine, familial hemiplegic, 3). In some embodiments, the disease or condition is Alzheimer's disease. In some embodiments, the disease or condition is SCN2A encephalopathy. In some embodiments, the disease or condition is SCN8A encephalopathy. In some embodiments, the disease or condition is SCN5A arrhythmia.

[0283] In some embodiments, the disease or condition is induced by a mutation in Na_{V}1.1 (a protein encoded by the SCN1A gene). “Na_{V}1.1,” also known as the sodium channel, voltage-gated, type I, alpha subunit (SCN1A), as used herein, refers to a protein which in humans is encoded by the SCN1A gene. Na_{V}1.1 includes any of the recombinant or naturally-occurring forms of Na_{V}1.1 protein or variants or homologs thereof that maintain Na_{V}1.1 activity, (e.g., within at least 50%, 80%, 90%, 95%, 96%, 97%, 98%, 99% or 100% activity compared to Na_{V}1.1). In some aspects, the variants or homologs have at least 80%, 85%, 90%, 95%, 96%, 97%, 98%, 99% or 100% amino acid sequence identity across the whole sequence or a portion of the sequence (e.g., a 50, 100, 150 or 200 continuous amino acid portion) compared to a naturally occurring Na_{V}1.1 protein. In some embodiments, the Na_{V}1.1 protein is substantially identical to the protein identified by the UniProt reference number P35498 or a variant or homolog having substantial identity thereto.

[0284] In some instances, the mutation is a loss-of-function mutation in Na 1.1. In some cases, the loss-of-function mutation in Na_{V}1.1 comprises one or more mutations that decreases or impairs the function of Na_{V}1.1 (e.g., by 10%, 20%, 30%, 40%, 50%, 60%, 70%, 80%, 90%, 95%, or more) relative to the function of a wild-type Naᵥ1.1. In some cases, the loss-of-function mutation in Naᵥ1.1 comprises one or more mutations that result in a disease phenotype. Exemplary loss-of-function mutations include, but are not limited to, R859C, T875M, V1353L, I1656M, R1657C, A1685V, M1841T, and R1916G.

[0285] In other instances, the mutation is a gain-of-function mutation in Na_{V}1.1. In such cases, the gain-of-function mutation comprises one or more mutations that prolongs activation of Naᵥ1.1 (e.g., by 10%, 20%, 30%, 40%, 50%, 60%, 70%, 80%, 90%, 95%, or more) relative to the function of a wild-type Naᵥ1.1. In such cases, the gain-of-function mutation in Naᵥ1.1 comprises one or more mutations that result in a disease phenotype. Exemplary gain-of-function mutations include, but are not limited to, D188V, W1204R, R1648H, and D1866Y.

[0286] In some embodiments, the disease or condition is an encephalopathy. In some cases, the encephalopathy is induced by a loss-of-function mutation in Na_{V}1.1.

[0287] In some embodiments, the encephalopathy is epileptic encephalopathy. Exemplary epileptic encephalopathies include, but are not limited to, Dravet Syndrome (DS) (also known as severe myoclonic epilepsy of infancy or SMEI); severe myoclonic epilepsy of infancy (SMEI)-borderland (SMEB); Febrile seizure (FS); epilepsy, generalized, with febrile seizures plus (GEFS+); epileptic encephalopathy, early infantile, 13; cryptogenic generalized epilepsy; cryptogenic focal epilepsy; myoclonic-astatic epilepsy; Lennox-Gastaut syndrome; West syndrome; idiopathic spasms; early myoclonic encephalopathy; progressive myoclonic epilepsy; alternating hemiplegia of childhood; unclassified epileptic encephalopathy; sudden unexpected death in epilepsy (SUDEP); early infantile SCN1A encephalopathy; early infantile epileptic encephalopathy (EIEE); autism; malignant migrating partial seizures of infancy; or sick sinus syndrome 1. In some embodiments, the disease or condition is epileptic encephalopathy, optionally selected from Dravet Syndrome (DS) (also known as severe myoclonic epilepsy of infancy or SMEI); severe myoclonic epilepsy of infancy (SMEI)-borderland (SMEB); Febrile seizure (FS); epilepsy, generalized, with febrile seizures plus (GEFS+); epileptic encephalopathy, early infantile, 13; cryptogenic generalized epilepsy; cryptogenic focal epilepsy; myoclonic-astatic epilepsy; Lennox-Gastaut syndrome; West syndrome; idiopathic spasms; early myoclonic encephalopathy; progressive myoclonic epilepsy; alternating hemiplegia of childhood; unclassified epileptic encephalopathy; sudden unexpected death in epilepsy (SUDEP); and sick sinus syndrome 1.

[0288] In some instances, GEFS+ is epilepsy, generalized, with febrile seizures plus, type 2.

[0289] In some instances, the Febrile seizure is Febrile seizures, familial, 3A.

[0290] In some instances, SMEB is SMEB without generalized spike wave (SMEB-SW), SMEB with-out myoclonic seizures (SMEB-M), SMEB lacking more than one feature of SMEI (SMEB-O), or intractable childhood epilepsy with generalized tonic-clonic seizures (ICEGTC).

[0291] In some embodiments, GEFS+ is epilepsy, generalized, with febrile seizures plus, type 2. In some embodiments, the Febrile seizure is Febrile seizures, familial, 3A. In some embodiments, SMEB is SMEB without generalized spike wave (SMEB-SW), SMEB without myoclonic seizures (SMEB-M), SMEB lacking more than one feature of SMEI (SMEB-O), or intractable childhood epilepsy with generalized tonic-clonic seizures (ICEGTC).

[0292] In some embodiments, the diseases or conditions induced by a loss-of-function mutation in Na_{V}1.1 include, but are not limited to, Dravet Syndrome (DS) (also known as SMEI); severe myoclonic epilepsy of infancy (SMEI)-borderland (SMEB); Febrile seizure (FS); epilepsy, generalized, with febrile seizures plus (GEFS+); epileptic encephalopathy, early infantile, 13; cryptogenic generalized epilepsy; cryptogenic focal epilepsy; myoclonic-astatic epilepsy; Lennox-Gastaut syndrome; West syndrome; idiopathic spasms; early myoclonic encephalopathy; progressive myoclonic epilepsy; alternating hemiplegia of childhood; unclassified epileptic encephalopathy; sudden unexpected death in epilepsy (SUDEP); sick sinus syndrome 1; early infantile SCN1A encephalopathy; early infantile epileptic encephalopathy (EIEE); autism; or malignant migrating partial seizures of infancy.

[0293] In related embodiments, the method is a method of using an ASO to decrease the expression of a protein or functional RNA. In some embodiments, an ASO is used to decrease the expression of Na_{V}1.1 protein in cells of a subject having a NMD-inducing exon (NIE) containing pre-mRNA encoding Na_{V}1.1 protein. In some embodiments, the subject has a gain-of-function mutation in Na_{V}1.1, e.g., migraine. In some embodiments, an ASO is used to decrease the expression of Na_{V}1.1 protein in cells of a subject, the subject has again-of-function mutation in Na_{V}1.1, e.g., migraine, familial hemiplegic, 3.

[0294] In some embodiments, the level of mRNA encoding Na_{V}1.1 protein is decreased 1.1 to 10-fold, when compared to the amount of mRNA encoding Na_{V}1.1 protein that is produced in a control cell, e.g., one that is not treated with the antisense oligomer or one that is treated with an antisense oligomer that does not bind to the targeted portion of the SCN1A NIE containing pre-mRNA.

[0295] In some embodiments, the disease or condition is a Na_{V}1.1 genetic epilepsy. The Na_{V}1.1 genetic epilepsy can include a loss-of-function mutation in Naᵥ1.1 or a gain-of-function mutation in Naᵥ1.1. In some cases, the Na_{V}1.1 genetic epilepsy includes one or more hereditary mutations. In other cases, the Na_{V}1.1 genetic epilepsy includes one or more de novo mutations. In some cases, the Na_{V}1.1 genetic epilepsy includes Dravet Syndrome (DS) (also known as severe myoclonic epilepsy of infancy or SMEI); severe myoclonic epilepsy of infancy (SMEI)-borderland (SMEB); Febrile seizure (FS); epilepsy, generalized, with febrile seizures plus (GEFS+); epileptic encephalopathy, early infantile, 13; cryptogenic generalized epilepsy; cryptogenic focal epilepsy; myoclonic-astatic epilepsy; Lennox-Gastaut syndrome; West syndrome; idiopathic spasms; early myoclonic encephalopathy; progressive myoclonic epilepsy; alternating hemiplegia of childhood; unclassified epileptic encephalopathy; early infantile SCN1A encephalopathy; early infantile epileptic encephalopathy (EIEE); sudden unexpected death in epilepsy (SUDEP); or malignant migrating partial seizures of infancy. In some cases, the Naᵥ1.1 genetic epilepsy associated with a loss-of-function mutation in Naᵥ1.1 includes Dravet Syndrome (DS) (also known as severe myoclonic epilepsy of infancy or SMEI); severe myoclonic epilepsy of infancy (SMEI)-borderland (SMEB); Febrile seizure (FS); epilepsy, generalized, with febrile seizures plus (GEFS+); epileptic encephalopathy, early infantile, 13; cryptogenic generalized epilepsy; cryptogenic focal epilepsy; myoclonic-astatic epilepsy; Lennox-Gastaut syndrome; West syndrome; idiopathic spasms; early myoclonic encephalopathy; progressive myoclonic epilepsy; alternating hemiplegia of childhood; unclassified epileptic encephalopathy; early infantile SCN1A encephalopathy; early infantile epileptic encephalopathy (EIEE); sudden unexpected death in epilepsy (SUDEP); malignant migrating partial seizures of infancy.

[0296] In some embodiments, the disease or condition is associated with a haploinsufficiency of the SCN1A gene. Exemplary diseases or conditions associated with a haploinsufficiency of the SCN1A gene include, but are not limited to, Dravet Syndrome (DS) (also known as SMEI); severe myoclonic epilepsy of infancy (SMEI)-borderland (SMEB); Febrile seizure (FS); epilepsy, generalized, with febrile seizures plus (GEFS+); epileptic encephalopathy, early infantile, 13; cryptogenic generalized epilepsy; cryptogenic focal epilepsy; myoclonic-astatic epilepsy; Lennox-Gastaut syndrome; West syndrome; idiopathic spasms; early myoclonic encephalopathy; progressive myoclonic epilepsy; alternating hemiplegia of childhood; unclassified epileptic encephalopathy; sudden unexpected death in epilepsy (SUDEP); sick sinus syndrome 1; early infantile SCN1A encephalopathy; early infantile epileptic encephalopathy (EIEE); or malignant migrating partial seizures of infancy. In some cases, the disease or condition is Dravet Syndrome (DS) (also known as SMEI); severe myoclonic epilepsy of infancy (SMEI)-borderland (SMEB); Febrile seizure (FS); epilepsy, generalized, with febrile seizures plus (GEFS+); epileptic encephalopathy, early infantile, 13; cryptogenic generalized epilepsy; cryptogenic focal epilepsy; myoclonic-astatic epilepsy; Lennox-Gastaut syndrome; West syndrome; idiopathic spasms; early myoclonic encephalopathy; progressive myoclonic epilepsy; alternating hemiplegia of childhood; unclassified epileptic encephalopathy; sudden unexpected death in epilepsy (SUDEP); sick sinus syndrome 1; early infantile SCN1A encephalopathy; early infantile epileptic encephalopathy (EIEE); or malignant migrating partial seizures of infancy.

[0297] In some cases, the disease or condition is Dravet Syndrome (DS).

[0298] The term “epilepsy,” as used herein, refers to a group of neurological disorders characterized by recurrent epileptic seizures. “Epileptic seizures,” as used herein, refer to episodes that may vary from brief and nearly undetectable periods to long periods of vigorous shaking. Exemplary types of seizure include, but are not limited to, convulsive, non-convulsive, focal, and generalized seizures. Exemplary types of generalized seizures include, but are not limited to, tonic-clonic, tonic, clonic, myoclonic, absence, and atonic seizures.

[0299] In some embodiments, the disease or condition is induced by a gain-of-function mutation in Naᵥ1.1. Exemplary diseases or conditions associated with a gain-of-function mutation in Na_{V}1.1 include, but are not limited to, migraine. In some instances, the disease or condition induced by a gain-of-function mutation in Naᵥ1.1 is migraine. In some embodiments, the migraine is migraine, familial hemiplegic, 3.

[0300] In some embodiments, the method is a method of decreasing the expression of the Na_{V}1.1 protein by cells of a subject having a NIE containing pre-mRNA encoding the Na_{V}1.1 protein, and wherein the subject has a gain-of-function mutation in Naᵥ1.1. In such an embodiment, the subject has an allele from which the Na_{V}1.1 protein is produced in an elevated amount or an allele encoding a mutant SCN1A that induces increased activity of Na_{V}1.1 in the cell. In some embodiments, the increased activity of Na_{V}1.1 is characterized by a prolonged or near persistent sodium current mediated by the mutant Naᵥ1.1 channel, a slowing of fast inactivation, a positive shift in steady-state inactivation, higher channel availability during repetitive stimulation, increased non-inactivated depolarization-induced persistent sodium currents, delayed entry into inactivation, accelerated recovery from fast inactivation, and/or rescue of folding defects by incubation at lower temperature or co-expression of interacting proteins. In any of these embodiments, the antisense oligomer binds to a targeted portion of the NIE containing pre-mRNA transcribed from the second allele, thereby inhibiting or blocking exon skipping of the pseudo-exon from the pre-mRNA, and causing a decrease in the level of mature mRNA encoding functional Na_{V}1.1 protein, and a decrease in the expression of the Na_{V}1.1 protein in the cells of the subject.

### Compositions

[0301] In some embodiments, the ASO comprises a sequence with at least 83%, 88%, 94% or 100% sequence identity to any one of SEQ ID NOs: 21-67, 210-256 or 304-1099. In some embodiments, the ASO consists of a sequence with at least 83%, 88%, 94% or 100% sequence identity to any one of SEQ ID NOs: 21-67, 210-256 or 304-1099. In some embodiments, the ASO comprises a sequence with at least 83%, 88%, 94% or 100% sequence identity to any one of the sequences listed in listed in Tables 4a, 4b, 5a, 5b, 6a, 6b, 7, 8a, and 8b. In some embodiments, the ASO consists of a sequence with at least 83%, 88%, 94% or 100% sequence identity to any one of the sequences listed in listed in Tables 4a, 4b, 5a, 5b, 6a, 6b, 7, 8a, and 8b.

[0302] In some embodiments, the ASO comprises a sequence with at least 60%, 65%, 66%, 67%, 68%, 69%, 70%, 71%, 72%, 73%, 74%, 75%, 76%, 77%, 78%, 79%, 80%, 81%, 82%, 83%, 884%, 85%, 86%, 87%, 88%, 89%, 90%, 91%, 92%, 93%, 94%, 95%, 96%, 97%, 98%, 99%, 99.5%, 99.8%, 99.9%, or 100% sequence identity to any one of SEQ ID NOs: 21-67, 210-256 or 304-1099. In some embodiments, the ASO consists of a sequence with at least 60%, 65%, 66%, 67%, 68%, 69%, 70%, 71%, 72%, 73%, 74%, 75%, 76%, 77%, 78%, 79%, 80%, 81%, 82%, 83%, 884%, 85%, 86%, 87%, 88%, 89%, 90%, 91%, 92%, 93%, 94%, 95%, 96%, 97%, 98%, 99%, 99.5%, 99.8%, 99.9%, or 100% sequence identity to any one of SEQ ID NOs: 21-67, 210-256 or 304-1099. In some embodiments, the ASO comprises a sequence with at least 60%, 65%, 66%, 67%, 68%, 69%, 70%, 71%, 72%, 73%, 74%, 75%, 76%, 77%, 78%, 79%, 80%, 81%, 82%, 83%, 884%, 85%, 86%, 87%, 88%, 89%, 90%, 91%, 92%, 93%, 94%, 95%, 96%, 97%, 98%, 99%, 99.5%, 99.8%, 99.9%, or 100% sequence identity to any one of the sequences listed in listed in Tables 4a, 4b, 5a, 5b, 6a, 6b, 7, 8a, and 8b. In some embodiments, the ASO consists of a sequence with at least 60%, 65%, 66%, 67%, 68%, 69%, 70%, 71%, 72%, 73%, 74%, 75%, 76%, 77%, 78%, 79%, 80%, 81%, 82%, 83%, 884%, 85%, 86%, 87%, 88%, 89%, 90%, 91%, 92%, 93%, 94%, 95%, 96%, 97%, 98%, 99%, 99.5%, 99.8%, 99.9%, or 100% sequence identity to any one of the sequences listed in listed in Tables 4a, 4b, 5a, 5b, 6a, 6b, 7, 8a, and 8b.

[0303] In some embodiments, the ASO as described herein comprises at least one modified sugar moiety.

[0304] In some embodiments, the ASO as described herein comprises T-methoxyethyl sugar moiety. In some embodiments, the T-methoxyethyl sugar moiety is a T-2′-methoxyethyl sugar moiety. In some embodiments, the ASO as described herein comprises a 2′-O-methoxyethyl moiety. In some embodiments, the ASO as described herein comprises a thymidine comprising a 2′-O-methoxyethyl moiety. In some embodiments, each nucleobase of the ASO as described herein comprises a 2′-O-methoxyethyl moiety.

[0305] In some embodiments, the ASO as described herein consists of from 8 to 50 nucleobases. In some embodiments, the ASO as described herein consists of from 16 to 20 nucleobases. In some embodiments, the ASO as described herein consists of from 12 to 20 nucleobases. In some embodiments, the ASO as described herein consists of from 8 to 20 nucleobases.

[0306] In some embodiments, the ASO as described herein consists of from 5 to 100, from 6 to 100, from 7 to 100, from 8 to 100, from 9 to 100, from 10 to 100, from 11 to 100, from 12 to 100, from 13 to 100, from 14 to 100, from 15 to 100, from 16 to 100, from 17 to 100, from 18 to 100, from 19 to 100, from 20 to 100, from 21 to 100, from 22 to 100, from 23 to 100, from 24 to 100, from 25 to 100, from 30 to 100, from 35 to 100, from 40 to 100, from 45 to 100, from 50 to 100, from 55 to 100, from 60 to 100, from 65 to 100, from 70 to 100, from 75 to 100, from 80 to 100, from 85 to 100, or from 90 to 100 nucleobases. In some embodiments, the ASO as described herein consists of from 5 to 100, 5 to 95, 5 to 90, 5 to 85, 5 to 80, 5 to 75, 5 to 70, 5 to 65, 5 to 60, 5 to 55, 5 to 50, 5 to 45, 5 to 40, 5 to 35, 5 to 30, 5 to 25, 5 to 20, 5 to 15, or 5 to 10 nucleobases. In some embodiments, the ASO as described herein consists of from 8 to 50, from 8 to 45, from 8 to 40, from 8 to 35, from 8 to 30, from 8 to 29, from 8 to 28, from 8 to 27, from 8 to 26, from 8 to 25, from 8 to 24, from 8 to 23, from 8 to 22, from 8 to 21, from 8 to 20, from 8 to 19, from 8 to 18, from 8 to 17, or from 8 to 16 nucleobases.

[0307] In some embodiments, the ASO as described herein consists of from 9 to 20, from 10 to 20, from 11 to 20, from 12 to 20, from 13 to 20, from 14 to 20, from 15 to 20, from 16 to 20, from 17 to 20, or from 18 to 20 nucleobases.

[0308] In some embodiments, the ASO as described herein consists of 5, 6, 7, 8, 9, 10, 11, 12, 13, 14, 15, 16, 17, 18, 19, 20, 21, 22, 23, 24, 25, 26, 27, 28, 29, 30, 31, 32, 33, 34, 35, 36, 37, 38, 39, or 40 nucleobases.

[0309] In some embodiments, the ASO as described herein comprises a 5′-methylcytosine (5′-MeC). In some embodiments, each cytosine of the ASO as described herein is a 5′-methylcytosine (5′-MeC).

[0310] In some embodiments, the ASO as described herein comprises a phosphorothioate linkage. In some embodiments, each internucleoside linkage of the ASO as described herein is a phosphorothioate linkage.

[0311] In some embodiments, the ASO as described herein comprises a locked nucleic acid (LNA).

[0312] In some embodiments, the ASO as described herein comprises least 1, 2, 3, 4, 5, 6, 7, 8, 9, 10, 11, 12, 13, 14, 15, 16, 17, 18, 19, or 20 LNAs. In some embodiments, the ASO as described herein comprises 1 to 20, 1 to 19, 1 to 18, 1 to 17, 1 to 16, 1 to 15, 1 to 14, 1 to 13, 1 to 12, 1 to 11, 1 to 10, 1 to 9, 1 to 8, 1 to 7, 1 to 6, 1 to 5, 1 to 4, 1 to 3, or 1 to 2 LNAs. In some embodiments, the ASO as described herein comprises 1, 2, 3, 4, 5, 6, 7, 8, 9, 10, 11, 12, 13, 14, 15, 16, 17, 18, 19, or 20 LNAs.

[0313] In some embodiments, the 5′ end nucleotide of the ASO as described herein is a LNA. In some embodiments, the 3′ end nucleotide of the ASO as described herein is a LNA. In some embodiments, the 5′ and 3′ end nucleotides of the ASO as described herein are LNAs.

### ASO (Antisense Oligomers)

[0314] Provided herein is a composition comprising an antisense oligomer that induces exon skipping by binding to a targeted portion of a SCN1A NIE containing pre-mRNA. As used herein, the terms “ASO” and “antisense oligomer” are used interchangeably and refer to an oligomer such as a polynucleotide, comprising nucleobases that hybridizes to a target nucleic acid (e.g., a SCN1A NIE containing pre-mRNA) sequence by Watson-Crick base pairing or wobble base pairing (G-U). The ASO may have exact sequence complementary to the target sequence or near complementarity (e.g., sufficient complementarity to bind the target sequence and enhancing splicing at a splice site). ASOs are designed so that they bind (hybridize) to a target nucleic acid (e.g., a targeted portion of a pre-mRNA transcript) and remain hybridized under physiological conditions. Typically, if they hybridize to a site other than the intended (targeted) nucleic acid sequence, they hybridize to a limited number of sequences that are not a target nucleic acid (to a few sites other than a target nucleic acid). Design of an ASO can take into consideration the occurrence of the nucleic acid sequence of the targeted portion of the pre-mRNA transcript or a sufficiently similar nucleic acid sequence in other locations in the genome or cellular pre-mRNA or transcriptome, such that the likelihood the ASO will bind other sites and cause “off-target” effects is limited. Any antisense oligomers known in the art, for example in PCT Application No. PCT/US2014/054151, published as WO 2015/035091, titled “Reducing Nonsense-Mediated mRNA Decay,” incorporated by reference herein, can be used to practice the methods described herein.

[0315] In some embodiments, ASOs “specifically hybridize” to or are “specific” to a target nucleic acid or a targeted portion of a NIE containing pre-mRNA. Typically such hybridization occurs with a Tₘ substantially greater than 37° C., preferably at least 50° C., and typically between 60° C., to approximately 90° C. Such hybridization preferably corresponds to stringent hybridization conditions. At a given ionic strength and pH, the Tₘ is the temperature at which 50% of a target sequence hybridizes to a complementary oligonucleotide.

[0316] Oligomers, such as oligonucleotides, are “complementary” to one another when hybridization occurs in an antiparallel configuration between two single-stranded polynucleotides. A double-stranded polynucleotide can be “complementary” to another polynucleotide, if hybridization can occur between one of the strands of the first polynucleotide and the second. Complementarity (the degree to which one polynucleotide is complementary with another) is quantifiable in terms of the proportion (e.g., the percentage) of bases in opposing strands that are expected to form hydrogen bonds with each other, according to generally accepted base-pairing rules. The sequence of an antisense oligomer (ASO) need not be 100% complementary to that of its target nucleic acid to hybridize. In certain embodiments, ASOs can comprise at least 70%, at least 75%, at least 80%, at least 85%, at least 90%, at least 95%, at least 96%, at least 97%, at least 98%, or at least 99% sequence complementarity to a target region within the target nucleic acid sequence to which they are targeted. For example, an ASO in which 18 of 20 nucleobases of the oligomeric compound are complementary to a target region, and would therefore specifically hybridize, would represent 90 percent complementarity. In this example, the remaining non-complementary nucleobases may be clustered together or interspersed with complementary nucleobases and need not be contiguous to each other or to complementary nucleobases. Percent complementarity of an ASO with a region of a target nucleic acid can be determined routinely using BLAST programs (basic local alignment search tools) and PowerBLAST programs known in the art (Altschul, et al., J. Mol. Biol., 1990, 215, 403-410; Zhang and Madden, Genome Res., 1997, 7, 649-656, of which entire content is incorporated herein by reference).

[0317] An ASO need not hybridize to all nucleobases in a target sequence and the nucleobases to which it does hybridize may be contiguous or noncontiguous. ASOs may hybridize over one or more segments of a pre-mRNA transcript, such that intervening or adjacent segments are not involved in the hybridization event (e.g., a loop structure or hairpin structure may be formed). In certain embodiments, an ASO hybridizes to noncontiguous nucleobases in a target pre-mRNA transcript. For example, an ASO can hybridize to nucleobases in a pre-mRNA transcript that are separated by one or more nucleobase(s) to which the ASO does not hybridize.

[0318] The ASOs described herein comprise nucleobases that are complementary to nucleobases present in a targeted portion of a NIE containing pre-mRNA. The term ASO embodies oligonucleotides and any other oligomeric molecule that comprises nucleobases capable of hybridizing to a complementary nucleobase on a target mRNA but does not comprise a sugar moiety, such as a peptide nucleic acid (PNA). The ASOs may comprise naturally-occurring nucleotides, nucleotide analogs, modified nucleotides, or any combination of two or three of the preceding. The term “naturally occurring nucleotides” includes deoxyribonucleotides and ribonucleotides. The term “modified nucleotides” includes nucleotides with modified or substituted sugar groups and/or having a modified backbone. In some embodiments, all of the nucleotides of the ASO are modified nucleotides. Chemical modifications of ASOs or components of ASOs that are compatible with the methods and compositions described herein will be evident to one of skill in the art and can be found, for example, in U.S. Pat. No. 8,258,109 B2, U.S. Pat. No. 5,656,612, U.S. Patent Publication No. 2012/0190728, and Dias and Stein, Mol. Cancer Ther. 2002, 347-355, herein incorporated by reference in their entirety.

[0319] One or more nucleobases of an ASO may be any naturally occurring, unmodified nucleobase such as adenine, guanine, cytosine, thymine and uracil, or any synthetic or modified nucleobase that is sufficiently similar to an unmodified nucleobase such that it is capable of hydrogen bonding with a nucleobase present on a target pre-mRNA. Examples of modified nucleobases include, without limitation, hypoxanthine, xanthine, 7-methylguanine, 5, 6-dihydrouracil, 5-methylcytosine, and 5-hydroxymethoylcytosine.

[0320] The ASOs described herein also comprise a backbone structure that connects the components of an oligomer. The term “backbone structure” and “oligomer linkages” may be used interchangeably and refer to the connection between monomers of the ASO. In naturally occurring oligonucleotides, the backbone comprises a 3′-5′ phosphodiester linkage connecting sugar moieties of the oligomer. The backbone structure or oligomer linkages of the ASOs described herein may include (but are not limited to) phosphorothioate, phosphorodithioate, phosphoroselenoate, phosphorodiselenoate, phosphoroanilothioate, phosphoraniladate, phosphoramidate, and the like. See, e.g., LaPlanche, et al., Nucleic Acids Res. 14:9081(1986); Stec, et al., J. Am. Chem. Soc. 106:6077 (1984), Stein, et al., Nucleic Acids Res. 16:3209 (1988), Zon, et al., Anti-Cancer Drug Design 6:539 (1991); Zon, et al., Oligonucleotides and Analogues: A Practical Approach, pp. 87-108 (F. Eckstein, Ed., Oxford University Press, Oxford England (1991)); Stec, et al., U.S. Pat. No. 5,151,510; Uhlmann and Peyman, Chemical Reviews 90:543 (1990), of which entire content is incorporated herein by reference. In some embodiments, the backbone structure of the ASO does not contain phosphorous but rather contains peptide bonds, for example in a peptide nucleic acid (PNA), or linking groups including carbamate, amides, and linear and cyclic hydrocarbon groups. In some embodiments, the backbone modification is a phosphothioate linkage. In some embodiments, the backbone modification is a phosphoramidate linkage.

[0321] In embodiments, the stereochemistry at each of the phosphorus internucleotide linkages of the ASO backbone is random. In embodiments, the stereochemistry at each of the phosphorus internucleotide linkages of the ASO backbone is controlled and is not random. For example, U.S. Pat. App. Pub. No. 2014/0194610, “Methods for the Synthesis of Functionalized Nucleic Acids,” incorporated herein by reference, describes methods for independently selecting the handedness of chirality at each phosphorous atom in a nucleic acid oligomer. In embodiments, an ASO used in the methods of the invention, including, but not limited to, any of the ASOs set forth herein in Tables 5 and 6, comprises an ASO having phosphorus internucleotide linkages that are not random. In embodiments, a composition used in the methods of the invention comprises a pure diastereomeric ASO. In embodiments, a composition used in the methods of the invention comprises an ASO that has diastereomeric purity of at least about 90%, at least about 91%, at least about 92%, at least about 93%, at least about 94%, at least about 95%, at least about 96%, at least about 97%, at least about 98%, at least about 99%, about 100%, about 90% to about 100%, about 91% to about 100%, about 92% to about 100%, about 93% to about 100%, about 94% to about 100%, about 95% to about 100%, about 96% to about 100%, about 97% to about 100%, about 98% to about 100%, or about 99% to about 100%.

[0322] In embodiments, the ASO has a nonrandom mixture of Rp and Sp configurations at its phosphorus internucleotide linkages. For example, it has been suggested that a mix of Rp and Sp is required in antisense oligonucleotides or antisense oligomers to achieve a balance between good activity and nuclease stability (Wan, et al., 2014, “Synthesis, biophysical properties and biological activity of second generation antisense oligonucleotides containing chiral phosphorothioate linkages,” Nucleic Acids Research 42(22): 13456-13468, incorporated herein by reference). In embodiments, an ASO used in the methods of the invention, including, but not limited to, any of the ASOs set forth herein in SEQ ID NOs: 21-114, comprises about 5-100% Rp, at least about 5% Rp, at least about 10% Rp, at least about 15% Rp, at least about 20% Rp, at least about 25% Rp, at least about 30% Rp, at least about 35% Rp, at least about 40% Rp, at least about 45% Rp, at least about 50% Rp, at least about 55% Rp, at least about 60% Rp, at least about 65% Rp, at least about 70% Rp, at least about 75% Rp, at least about 80% Rp, at least about 85% Rp, at least about 90% Rp, or at least about 95% Rp, with the remainder Sp, or about 100% Rp. In embodiments, an ASO used in the methods of the invention, including, but not limited to, any of the ASOs set forth herein in SEQ ID NOs: 21-114, comprises about 10% to about 100% Rp, about 15% to about 100% Rp, about 20% to about 100% Rp, about 25% to about 100% Rp, about 30% to about 100% Rp, about 35% to about 100% Rp, about 40% to about 100% Rp, about 45% to about 100% Rp, about 50% to about 100% Rp, about 55% to about 100% Rp, about 60% to about 100% Rp, about 65% to about 100% Rp, about 70% to about 100% Rp, about 75% to about 100% Rp, about 80% to about 100% Rp, about 85% to about 100% Rp, about 90% to about 100% Rp, or about 95% to about 100% Rp, about 20% to about 80% Rp, about 25% to about 75% Rp, about 30% to about 70% Rp, about 40% to about 60% Rp, or about 45% to about 55% Rp, with the remainder Sp.

[0323] In embodiments, an ASO used in the methods of the invention, including, but not limited to, any of the ASOs set forth herein in SEQ ID NOs: 21-114, comprises about 5-100% Sp, at least about 5% Sp, at least about 10% Sp, at least about 15% Sp, at least about 20% Sp, at least about 25% Sp, at least about 30% Sp, at least about 35% Sp, at least about 40% Sp, at least about 45% Sp, at least about 50% Sp, at least about 55% Sp, at least about 60% Sp, at least about 65% Sp, at least about 70% Sp, at least about 75% Sp, at least about 80% Sp, at least about 85% Sp, at least about 90% Sp, or at least about 95% Sp, with the remainder Rp, or about 100% Sp. In embodiments, an ASO used in the methods of the invention, including, but not limited to, any of the ASOs set forth herein in SEQ ID NOs: 21-114, comprises about 10% to about 100% Sp, about 15% to about 100% Sp, about 20% to about 100% Sp, about 25% to about 100% Sp, about 30% to about 100% Sp, about 35% to about 100% Sp, about 40% to about 100% Sp, about 45% to about 100% Sp, about 50% to about 100% Sp, about 55% to about 100% Sp, about 60% to about 100% Sp, about 65% to about 100% Sp, about 70% to about 100% Sp, about 75% to about 100% Sp, about 80% to about 100% Sp, about 85% to about 100% Sp, about 90% to about 100% Sp, or about 95% to about 100% Sp, about 20% to about 80% Sp, about 25% to about 75% Sp, about 30% to about 70% Sp, about 40% to about 60% Sp, or about 45% to about 55% Sp, with the remainder Rp.

[0324] In embodiments, an ASO used in the methods of the invention, including, but not limited to, any of the ASOs set forth herein in SEQ ID NOs: 21-67, 210-256 or 304-1099, comprises about 5-100% Rp, at least about 5% Rp, at least about 10% Rp, at least about 15% Rp, at least about 20% Rp, at least about 25% Rp, at least about 30% Rp, at least about 35% Rp, at least about 40% Rp, at least about 45% Rp, at least about 50% Rp, at least about 55% Rp, at least about 60% Rp, at least about 65% Rp, at least about 70% Rp, at least about 75% Rp, at least about 80% Rp, at least about 85% Rp, at least about 90% Rp, or at least about 95% Rp, with the remainder Sp, or about 100% Rp. In embodiments, an ASO used in the methods of the invention, including, but not limited to, any of the ASOs set forth herein in SEQ ID NOs: 21-67, 210-256 or 304-1099, comprises about 10% to about 100% Rp, about 15% to about 100% Rp, about 20% to about 100% Rp, about 25% to about 100% Rp, about 30% to about 100% Rp, about 35% to about 100% Rp, about 40% to about 100% Rp, about 45% to about 100% Rp, about 50% to about 100% Rp, about 55% to about 100% Rp, about 60% to about 100% Rp, about 65% to about 100% Rp, about 70% to about 100% Rp, about 75% to about 100% Rp, about 80% to about 100% Rp, about 85% to about 100% Rp, about 90% to about 100% Rp, or about 95% to about 100% Rp, about 20% to about 80% Rp, about 25% to about 75% Rp, about 30% to about 70% Rp, about 40% to about 60% Rp, or about 45% to about 55% Rp, with the remainder Sp.

[0325] In embodiments, an ASO used in the methods of the invention, including, but not limited to, any of the ASOs set forth herein in SEQ ID NOs: 21-67, 210-256 or 304-1099, comprises about 5-100% Sp, at least about 5% Sp, at least about 10% Sp, at least about 15% Sp, at least about 20% Sp, at least about 25% Sp, at least about 30% Sp, at least about 35% Sp, at least about 40% Sp, at least about 45% Sp, at least about 50% Sp, at least about 55% Sp, at least about 60% Sp, at least about 65% Sp, at least about 70% Sp, at least about 75% Sp, at least about 80% Sp, at least about 85% Sp, at least about 90% Sp, or at least about 95% Sp, with the remainder Rp, or about 100% Sp. In embodiments, an ASO used in the methods of the invention, including, but not limited to, any of the ASOs set forth herein in SEQ ID NOs: 21-67, 210-256 or 304-1099, comprises about 10% to about 100% Sp, about 15% to about 100% Sp, about 20% to about 100% Sp, about 25% to about 100% Sp, about 30% to about 100% Sp, about 35% to about 100% Sp, about 40% to about 100% Sp, about 45% to about 100% Sp, about 50% to about 100% Sp, about 55% to about 100% Sp, about 60% to about 100% Sp, about 65% to about 100% Sp, about 70% to about 100% Sp, about 75% to about 100% Sp, about 80% to about 100% Sp, about 85% to about 100% Sp, about 90% to about 100% Sp, or about 95% to about 100% Sp, about 20% to about 80% Sp, about 25% to about 75% Sp, about 30% to about 70% Sp, about 40% to about 60% Sp, or about 45% to about 55% Sp, with the remainder Rp.

[0326] In embodiments, an ASO used in the methods of the invention, including, but not limited to, any of the ASOs set forth herein in any one of the sequences listed in listed in Tables 4a, 4b, 5a, 5b, 6a, 6b, 7, 8a, and 8b, comprises about 5-100% Rp, at least about 5% Rp, at least about 10% Rp, at least about 15% Rp, at least about 20% Rp, at least about 25% Rp, at least about 30% Rp, at least about 35% Rp, at least about 40% Rp, at least about 45% Rp, at least about 50% Rp, at least about 55% Rp, at least about 60% Rp, at least about 65% Rp, at least about 70% Rp, at least about 75% Rp, at least about 80% Rp, at least about 85% Rp, at least about 90% Rp, or at least about 95% Rp, with the remainder Sp, or about 100% Rp. In embodiments, an ASO used in the methods of the invention, including, but not limited to, any of the ASOs set forth herein in any one of the sequences listed in listed in Tables 4a, 4b, 5a, 5b, 6a, 6b, 7, 8a, and 8b, comprises about 10% to about 100% Rp, about 15% to about 100% Rp, about 20% to about 100% Rp, about 25% to about 100% Rp, about 30% to about 100% Rp, about 35% to about 100% Rp, about 40% to about 100% Rp, about 45% to about 100% Rp, about 50% to about 100% Rp, about 55% to about 100% Rp, about 60% to about 100% Rp, about 65% to about 100% Rp, about 70% to about 100% Rp, about 75% to about 100% Rp, about 80% to about 100% Rp, about 85% to about 100% Rp, about 90% to about 100% Rp, or about 95% to about 100% Rp, about 20% to about 80% Rp, about 25% to about 75% Rp, about 30% to about 70% Rp, about 40% to about 60% Rp, or about 45% to about 55% Rp, with the remainder Sp.

[0327] In embodiments, an ASO used in the methods of the invention, including, but not limited to, any of the ASOs set forth herein in any one of the sequences listed in listed in Tables 4a, 4b, 5a, 5b, 6a, 6b, 7, 8a, and 8b, comprises about 5-100% Sp, at least about 5% Sp, at least about 10% Sp, at least about 15% Sp, at least about 20% Sp, at least about 25% Sp, at least about 30% Sp, at least about 35% Sp, at least about 40% Sp, at least about 45% Sp, at least about 50% Sp, at least about 55% Sp, at least about 60% Sp, at least about 65% Sp, at least about 70% Sp, at least about 75% Sp, at least about 80% Sp, at least about 85% Sp, at least about 90% Sp, or at least about 95% Sp, with the remainder Rp, or about 100% Sp. In embodiments, an ASO used in the methods of the invention, including, but not limited to, any of the ASOs set forth herein in any one of the sequences listed in listed in Tables 4a, 4b, 5a, 5b, 6a, 6b, 7, 8a, and 8b, comprises about 10% to about 100% Sp, about 15% to about 100% Sp, about 20% to about 100% Sp, about 25% to about 100% Sp, about 30% to about 100% Sp, about 35% to about 100% Sp, about 40% to about 100% Sp, about 45% to about 100% Sp, about 50% to about 100% Sp, about 55% to about 100% Sp, about 60% to about 100% Sp, about 65% to about 100% Sp, about 70% to about 100% Sp, about 75% to about 100% Sp, about 80% to about 100% Sp, about 85% to about 100% Sp, about 90% to about 100% Sp, or about 95% to about 100% Sp, about 20% to about 80% Sp, about 25% to about 75% Sp, about 30% to about 70% Sp, about 40% to about 60% Sp, or about 45% to about 55% Sp, with the remainder Rp.

[0328] Any of the ASOs described herein may contain a sugar moiety that comprises ribose or deoxyribose, as present in naturally occurring nucleotides, or a modified sugar moiety or sugar analog, including a morpholine ring. Non-limiting examples of modified sugar moieties include 2′ substitutions such as 2′-O-methyl (2′-O-Me), 2′-O-methoxyethyl (2′MOE), 2-O-aminoethyl, 2′F; N3′->P5′ phosphoramidate, 2′ dimethylaminooxyethoxy, 2′ dimethylaminoethoxyethoxy, 2′-guanidinidium, 2′-O-guanidinium ethyl, carbamate modified sugars, and bicyclic modified sugars. In some embodiments, the sugar moiety modification is selected from 2′-O-Me, 2′F, and 2′MOE. In some embodiments, the sugar moiety modification is an extra bridge bond, such as in a locked nucleic acid (LNA). In some embodiments the sugar analog contains a morpholine ring, such as phosphorodiamidate morpholino (PMO). In some embodiments, the sugar moiety comprises a ribofuransyl or 2′ deoxyribofuransyl modification. In some embodiments, the sugar moiety comprises 2′4′-constrained 2′O-methyloxyethyl (cMOE) modifications. In some embodiments, the sugar moiety comprises cEt 2′, 4′ constrained 2′-O ethyl BNA modifications. In some embodiments, the sugar moiety comprises tricycloDNA (tcDNA) modifications. In some embodiments, the sugar moiety comprises ethylene nucleic acid (ENA) modifications. In some embodiments, the sugar moiety comprises MCE modifications. Modifications are known in the art and described in the literature, e.g., by Jarver, et al., 2014, Nucleic Acid Therapeutics 24(1): 37-47, incorporated by reference for this purpose herein. “A Chemical View of Oligonucleotides for Exon Skipping and Related Drug Applications,” Nucleic Acid Therapeutics 24(1): 37-47, incorporated by reference for this purpose herein.

[0329] In some embodiments, each monomer of the ASO is modified in the same way, for example each linkage of the backbone of the ASO comprises a phosphorothioate linkage or each ribose sugar moiety comprises a 2′O-methyl modification. Such modifications that are present on each of the monomer components of an ASO are referred to as “uniform modifications.” In some examples, a combination of different modifications may be desired, for example, an ASO may comprise a combination of phosphorodiamidate linkages and sugar moieties comprising morpholine rings (morpholinos). Combinations of different modifications to an ASO are referred to as “mixed modifications” or “mixed chemistries.”

[0330] In some embodiments, the ASO comprises one or more backbone modifications. In some embodiments, the ASO comprises one or more sugar moiety modification. In some embodiments, the ASO comprises one or more backbone modifications and one or more sugar moiety modifications. In some embodiments, the ASO comprises a 2′MOE modification and a phosphorothioate backbone. In some embodiments, the ASO comprises a phosphorodiamidate morpholino (PMO). In some embodiments, the ASO comprises a peptide nucleic acid (PNA). Any of the ASOs or any component of an ASO (e.g., a nucleobase, sugar moiety, backbone) described herein may be modified in order to achieve desired properties or activities of the ASO or reduce undesired properties or activities of the ASO. For example, an ASO or one or more components of any ASO may be modified to enhance binding affinity to a target sequence on a pre-mRNA transcript; reduce binding to any non-target sequence; reduce degradation by cellular nucleases (i.e., RNase H); improve uptake of the ASO into a cell and/or into the nucleus of a cell; alter the pharmacokinetics or pharmacodynamics of the ASO; and/or modulate the half-life of the ASO.

[0331] In some embodiments, the ASOs are comprised of 2′-O-(2-methoxyethyl) (MOE) phosphorothioate-modified nucleotides. ASOs comprised of such nucleotides are especially well-suited to the methods disclosed herein; oligomers having such modifications have been shown to have significantly enhanced resistance to nuclease degradation and increased bioavailability, making them suitable, for example, for oral delivery in some embodiments described herein. See e.g., Geary, et al., J Pharmacol Exp Ther. 2001; 296(3):890-7; Geary, et al., J Pharmacol Exp Ther. 2001; 296(3):898-904, of which entire content is incorporated herein by reference.

[0332] Methods of synthesizing ASOs will be known to one of skill in the art. Alternatively or in addition, ASOs may be obtained from a commercial source.

[0333] Unless specified otherwise, the left-hand end of single-stranded nucleic acid (e.g., pre-mRNA transcript, oligonucleotide, ASO, etc.) sequences is the 5′ end and the left-hand direction of single or double-stranded nucleic acid sequences is referred to as the 5′ direction. Similarly, the right-hand end or direction of a nucleic acid sequence (single or double stranded) is the 3′ end or direction. Generally, a region or sequence that is 5′ to a reference point in a nucleic acid is referred to as “upstream,” and a region or sequence that is 3′ to a reference point in a nucleic acid is referred to as “downstream.” Generally, the 5′ direction or end of an mRNA is where the initiation or start codon is located, while the 3′ end or direction is where the termination codon is located. In some aspects, nucleotides that are upstream of a reference point in a nucleic acid may be designated by a negative number, while nucleotides that are downstream of a reference point may be designated by a positive number. For example, a reference point (e.g., an exon-exon junction in mRNA) may be designated as the “zero” site, and a nucleotide that is directly adjacent and upstream of the reference point is designated “minus one,” e.g., “−1,” while a nucleotide that is directly adjacent and downstream of the reference point is designated “plus one,” e.g., +1.

[0334] In some embodiments, the ASOs are complementary to (and bind to) a targeted portion of a SCN1A NIE containing pre-mRNA that is downstream (in the 3′ direction) of the 5′ splice site (or 3′ end of the NIE) of the included exon in a SCN1A NIE containing pre-mRNA (e.g., the direction designated by positive numbers relative to the 5′ splice site). In some embodiments, the ASOs are complementary to a targeted portion of the SCN1A NIE containing pre-mRNA that is within the region about +1 to about +500 relative to the 5′ splice site (or 3′ end) of the included exon. In some embodiments, the ASOs may be complementary to a targeted portion of a SCN1A NIE containing pre-mRNA that is within the region between nucleotides +6 and +496 relative to the 5′ splice site (or 3′ end) of the included exon. In some aspects, the ASOs are complementary to a targeted portion that is within the region about +1 to about +500, about +1 to about +490, about +1 to about +480, about +1 to about +470, about +1 to about +460, about +1 to about +450, about +1 to about +440, about +1 to about +430, about +1 to about +420, about +1 to about +410, about +1 to about +400, about +1 to about +390, about +1 to about +380, about +1 to about +370, about +1 to about +360, about +1 to about +350, about +1 to about +340, about +1 to about +330, about +1 to about +320, about +1 to about +310, about +1 to about +300, about +1 to about +290, about +1 to about +280, about +1 to about +270, about +1 to about +260, about +1 to about +250, about +1 to about +240, about +1 to about +230, about +1 to about +220, about +1 to about +210, about +1 to about +200, about +1 to about +190, about +1 to about +180, about +1 to about +170, about +1 to about +160, about +1 to about +150, about +1 to about +140, about +1 to about +130, about +1 to about +120, about +1 to about +110, about +1 to about +100, about +1 to about +90, about +1 to about +80, about +1 to about +70, about +1 to about +60, about +1 to about +50, about +1 to about +40, about +1 to about +30, or about +1 to about +20 relative to 5′ splice site (or 3′ end) of the included exon. In some aspects, the ASOs are complementary to a targeted portion that is within the region from about +1 to about +100, from about +100 to about +200, from about +200 to about +300, from about +300 to about +400, or from about +400 to about +500 relative to 5′ splice site (or 3′ end) of the included exon.

[0335] In some embodiments, the ASOs are complementary to (and bind to) a targeted portion of a SCN1A NIE containing pre-mRNA that is upstream (in the 5′ direction) of the 5′ splice site (or 3′ end) of the included exon in a SCN1A NIE containing pre-mRNA (e.g., the direction designated by negative numbers relative to the 5′ splice site). In some embodiments, the ASOs are complementary to a targeted portion of the SCN1A NIE containing pre-mRNA that is within the region about −4 to about −270 relative to the 5′ splice site (or 3′ end) of the included exon. In some embodiments, the ASOs may be complementary to a targeted portion of a SCN1A NIE containing pre-mRNA that is within the region between nucleotides −1 and −264 relative to the 5′ splice site (or 3′ end) of the included exon. In some aspects, the ASOs are complementary to a targeted portion that is within the region about −1 to about −270, about −1 to about −260, about −1 to about −250, about −1 to about −240, about −1 to about −230, about −1 to about −220, about −1 to about −210, about −1 to about −200, about −1 to about −190, about −1 to about −180, about −1 to about −170, about −1 to about −160, about −1 to about −150, about −1 to about −140, about −1 to about −130, about −1 to about −120, about −1 to about −110, about −1 to about −100, about −1 to about −90, about −1 to about −80, about −1 to about −70, about −1 to about −60, about −1 to about −50, about −1 to about −40, about −1 to about −30, or about −1 to about −20 relative to 5′ splice site (or 3′ end) of the included exon. In some aspects, the ASOs are complementary to a targeted portion that is within the region from about −1 to about −50, from about −50 to about −100, from about −100 to about −150, from about −150 to about −200, or from about −200 to about −250 relative to 5′ splice site (or 3′ end) of the included exon.

[0336] In some embodiments, the ASOs are complementary to a targeted region of a SCN1A NIE containing pre-mRNA that is upstream (in the 5′ direction) of the 3′ splice site (or 5′ end) of the included exon in a SCN1A NIE containing pre-mRNA (e.g., in the direction designated by negative numbers). In some embodiments, the ASOs are complementary to a targeted portion of the SCN1A NIE containing pre-mRNA that is within the region about −1 to about −500 relative to the 3′ splice site (or 5′ end) of the included exon. In some embodiments, the ASOs are complementary to a targeted portion of the SCN1A NIE containing pre-mRNA that is within the region −1 to −496 relative to the 3′ splice site of the included exon. In some aspects, the ASOs are complementary to a targeted portion that is within the region about −1 to about −500, about −1 to about −490, about −1 to about −480, about −1 to about −470, about −1 to about −460, about −1 to about −450, about −1 to about −440, about −1 to about −430, about −1 to about −420, about −1 to about −410, about −1 to about −400, about −1 to about −390, about −1 to about −380, about −1 to about −370, about −1 to about −360, about −1 to about −350, about −1 to about −340, about −1 to about −330, about −1 to about −320, about −1 to about −310, about −1 to about −300, about −1 to about −290, about −1 to about −280, about −1 to about −270, about −1 to about −260, about −1 to about −250, about −1 to about −240, about −1 to about −230, about −1 to about −220, about −1 to about −210, about −1 to about −200, about −1 to about −190, about −1 to about −180, about −1 to about −170, about −1 to about −160, about −1 to about −150, about −1 to about −140, about −1 to about −130, about −1 to about −120, about −1 to about −110, about −1 to about −100, about −1 to about −90, about −1 to about −80, about −1 to about −70, about −1 to about −60, about −1 to about −50, about −1 to about −40, or about −1 to about −30 relative to 3′ splice site of the included exon. In some aspects, the ASOs are complementary to a targeted portion that is within the region from about −1 to about −100, from about −100 to about −200, from about −200 to about −300, from about −300 to about −400, or from about −400 to about −500 relative to 3′ splice site of the included exon.

[0337] In some embodiments, the ASOs are complementary to a targeted region of a SCN1A NIE containing pre-mRNA that is downstream (in the 3′ direction) of the 3′ splice site (5′ end) of the included exon in a SCN1A NIE containing pre-mRNA (e.g., in the direction designated by positive numbers). In some embodiments, the ASOs are complementary to a targeted portion of the SCN1A NIE containing pre-mRNA that is within the region of about +1 to about +100 relative to the 3′ splice site of the included exon. In some aspects, the ASOs are complementary to a targeted portion that is within the region about +1 to about +90, about +1 to about +80, about +1 to about +70, about +1 to about +60, about +1 to about +50, about +1 to about +40, about +1 to about +30, about +1 to about +20, or about +1 to about +10 relative to 3′ splice site of the included exon.

[0338] In some embodiments, the targeted portion of the SCN1A NIE containing pre-mRNA is within the region +100 relative to the 5′ splice site (3′ end) of the included exon to −100 relative to the 3′ splice site (5′ end) of the included exon. In some embodiments, the targeted portion of the SCN1A NIE containing pre-mRNA is within the NIE. In some embodiments, the targeted portion of the SCN1A NIE containing pre-mRNA comprises a pseudo-exon and intron boundary.

[0339] The ASOs may be of any length suitable for specific binding and effective enhancement of splicing. In some embodiments, the ASOs consist of 8 to 50 nucleobases. For example, the ASO may be 8, 9, 10, 11, 12, 13, 14, 15, 16, 17, 18, 19, 20, 21, 22, 23, 24, 25, 26, 27, 28, 29, 30, 31, 32, 33, 34, 35, 40, 45, or 50 nucleobases in length. In some embodiments, the ASOs consist of more than 50 nucleobases. In some embodiments, the ASO is from 8 to 50 nucleobases, 8 to 40 nucleobases, 8 to 35 nucleobases, 8 to 30 nucleobases, 8 to 25 nucleobases, 8 to 20 nucleobases, 8 to 15 nucleobases, 9 to 50 nucleobases, 9 to 40 nucleobases, 9 to 35 nucleobases, 9 to 30 nucleobases, 9 to 25 nucleobases, 9 to 20 nucleobases, 9 to 15 nucleobases, 10 to 50 nucleobases, 10 to 40 nucleobases, 10 to 35 nucleobases, 10 to 30 nucleobases, 10 to 25 nucleobases, 10 to 20 nucleobases, 10 to 15 nucleobases, 11 to 50 nucleobases, 11 to 40 nucleobases, 11 to 35 nucleobases, 11 to 30 nucleobases, 11 to 25 nucleobases, 11 to 20 nucleobases, 11 to 15 nucleobases, 12 to 50 nucleobases, 12 to 40 nucleobases, 12 to 35 nucleobases, 12 to 30 nucleobases, 12 to 25 nucleobases, 12 to 20 nucleobases, 12 to 15 nucleobases, 13 to 50 nucleobases, 13 to 40 nucleobases, 13 to 35 nucleobases, 13 to 30 nucleobases, 13 to 25 nucleobases, 13 to 20 nucleobases, 14 to 50 nucleobases, 14 to 40 nucleobases, 14 to 35 nucleobases, 14 to 30 nucleobases, 14 to 25 nucleobases, 14 to 20 nucleobases, 15 to 50 nucleobases, 15 to 40 nucleobases, 15 to 35 nucleobases, 15 to 30 nucleobases, 15 to 25 nucleobases, 15 to 20 nucleobases, 20 to 50 nucleobases, 20 to 40 nucleobases, 20 to 35 nucleobases, 20 to 30 nucleobases, 20 to 25 nucleobases, 25 to 50 nucleobases, 25 to 40 nucleobases, 25 to 35 nucleobases, or 25 to 30 nucleobases in length. In some embodiments, the ASOs are 18 nucleotides in length. In some embodiments, the ASOs are 15 nucleotides in length. In some embodiments, the ASOs are 25 nucleotides in length.

[0340] In some embodiments, two or more ASOs with different chemistries but complementary to the same targeted portion of the NIE containing pre-mRNA are used. In some embodiments, two or more ASOs that are complementary to different targeted portions of the NIE containing pre-mRNA are used.

[0341] In embodiments, the antisense oligonucleotides or antisense oligomers of the invention are chemically linked to one or more moieties or conjugates, e.g., a targeting moiety or other conjugate that enhances the activity or cellular uptake of the oligonucleotide. Such moieties include, but are not limited to, a lipid moiety, e.g., as a cholesterol moiety, a cholesteryl moiety, an aliphatic chain, e.g., dodecandiol or undecyl residues, a polyamine or a polyethylene glycol chain, or adamantane acetic acid. Oligonucleotides comprising lipophilic moieties and preparation methods have been described in the published literature. In embodiments, the antisense oligonucleotide or antisense oligomer is conjugated with a moiety including, but not limited to, an abasic nucleotide, a polyether, a polyamine, a polyamide, a peptides, a carbohydrate, e.g., N-acetylgalactosamine (GalNAc), N-Ac-Glucosamine (GluNAc), or mannose (e.g., mannose-6-phosphate), a lipid, or a polyhydrocarbon compound. Conjugates can be linked to one or more of any nucleotides comprising the antisense oligonucleotide or antisense oligomer at any of several positions on the sugar, base or phosphate group, as understood in the art and described in the literature, e.g., using a linker. Linkers can include a bivalent or trivalent branched linker. In embodiments, the conjugate is attached to the 3′ end of the antisense oligonucleotide or antisense oligomer. Methods of preparing oligonucleotide conjugates are described, e.g., in U.S. Pat. No. 8,450,467, “Carbohydrate conjugates as delivery agents for oligonucleotides,” incorporated by reference herein.

[0342] In some embodiments, the nucleic acid to be targeted by an ASO is a SCN1A NIE containing pre-mRNA expressed in a cell, such as a eukaryotic cell. In some embodiments, the term “cell” may refer to a population of cells. In some embodiments, the cell is in a subject. In some embodiments, the cell is isolated from a subject. In some embodiments, the cell is ex vivo. In some embodiments, the cell is a condition or disease-relevant cell or a cell line. In some embodiments, the cell is in vitro (e.g., in cell culture).

[0343] In some embodiments, the ASO is the salt of a nucleotide. In some embodiments, the ASO is the salt of a nucleotide, fully phosphorothioate-linked oligonucleotide. In some embodiments, the ASO is the salt of a nucleotide in which the salt binds to the phosphate-link. In some embodiments, the ASO is the salt of a nucleotide, fully phosphorothioate-linked oligonucleotide in which the salt binds to the phosphate-link. In some embodiments, the ASO is the sodium salt of a nucleotide. In some embodiments, the ASO is the sodium salt of a nucleotide, fully phosphorothioate-linked oligonucleotide. In some embodiments, the ASO is the sodium salt of a nucleotide in which the sodium salt binds to the phosphate-link. In some embodiments, the ASO is the sodium salt of a nucleotide, fully phosphorothioate-linked oligonucleotide in which the sodium salt binds to the phosphate-link. In some embodiments, the ASO is the potassium salt of a nucleotide. In some embodiments, the ASO is the potassium salt of a nucleotide, fully phosphorothioate-linked oligonucleotide. In some embodiments, the ASO is the potassium salt of a nucleotide in which the potassium salt binds to the phosphate-link. In some embodiments, the ASO is the potassium salt of a nucleotide, fully phosphorothioate-linked oligonucleotide in which the potassium salt binds to the phosphate-link.

[0344] In some embodiment, the ASO is the monosodium salt of a 2-nucleotide (2-mer). In some embodiment, the ASO is the disodium salt of a 3-nucleotide (3-mer). In some embodiment, the ASO is the trisodium salt of a 4-nucleotide (4-mer). In some embodiment, the ASO is the tetrasodium salt of a 5-nucleotide (5-mer). In some embodiment, the ASO is the pentasodium salt of a 6-nucleotide (6-mer). In some embodiment, the ASO is the hexasodium salt of a 7-nucleotide (7-mer). In some embodiment, the ASO is the heptasodium salt of a 8-nucleotide (8-mer). In some embodiment, the ASO is the octasodium salt of a 9-nucleotide (9-mer). In some embodiment, the ASO is the nonasodium salt of a 10-nucleotide (10-mer). In some embodiment, the ASO is the decasodium salt of a 11-nucleotide (I1-mer). In some embodiment, the ASO is the undecasodium salt of a 12-nucleotide (12-mer). In some embodiment, the ASO is the dodecasodium salt of a 13-nucleotide (13-mer). In some embodiment, the ASO is the tridecasodium salt of a 14-nucleotide (14-mer). In some embodiment, the ASO is the tetradecasodium salt of a 15-nucleotide (15-mer). In some embodiment, the ASO is the pentadecasodium salt of a 16-nucleotide (16-mer). In some embodiment, the ASO is the hexadecasodium salt of a 17-nucleotide (17-mer). In some embodiment, the ASO is the heptadecasodium salt of a 18-nucleotide (18-mer). In some embodiment, the ASO is the octadecasodium salt of a 19-nucleotide (19-mer). In some embodiment, the ASO is the nonadecasodium salt of a 20-nucleotide (20-mer). In some embodiment, the ASO is the icosasodium salt of a 21-nucleotide (21-mer). In some embodiment, the ASO is the henicosasodium salt of a 22-nucleotide (22-mer). In some embodiment, the ASO is the docosasodium salt of a 23-nucleotide (23-mer). In some embodiment, the ASO is the tricosasodium salt of a 24-nucleotide (24-mer). In some embodiment, the ASO is the tetracosasodium salt of a 25-nucleotide (25-mer). In some embodiment, the ASO is the pentacosasodium salt of a 26-nucleotide (26-mer). In some embodiment, the ASO is the hexacosasodium salt of a 27-nucleotide (27-mer). In some embodiment, the ASO is the heptacosasodium salt of a 28-nucleotide (28-mer). In some embodiment, the ASO is the octacosasodium salt of a 29-nucleotide (29-mer). In some embodiment, the ASO is the nonacosasodium salt of a 30-nucleotide (30-mer). In some embodiment, the ASO is the triacontasodium salt of a 31-nucleotide (31-mer). In some embodiment, the ASO is the hentriacontasodium salt of a 32-nucleotide (32-mer). In some embodiment, the ASO is the dotriacontasodium salt of a 33-nucleotide (33-mer). In some embodiment, the ASO is the tritriacontasodium salt of a 34-nucleotide (34-mer). In some embodiment, the ASO is the tetratriacontasodium salt of a 35-nucleotide (35-mer). In some embodiment, the ASO is the pentatriacontasodium salt of a 36-nucleotide (36-mer). In some embodiment, the ASO is the hexatriacontasodium salt of a 37-nucleotide (37-mer). In some embodiment, the ASO is the heptatriacontasodium salt of a 38-nucleotide (38-mer). In some embodiment, the ASO is the octatriacontasodium salt of a 39-nucleotide (39-mer). In some embodiment, the ASO is the nonatriacontasodium salt of a 40-nucleotide (40-mer). In some embodiment, the ASO is the tetracontasodium salt of a 41-nucleotide (41-mer). In some embodiment, the ASO is the hentetracontasodium salt of a 42-nucleotide (42-mer). In some embodiment, the ASO is the dotetracontasodium salt of a 43-nucleotide (43-mer). In some embodiment, the ASO is the tritetracontasodium salt of a 44-nucleotide (44-mer). In some embodiment, the ASO is the tetratetracontasodium salt of a 45-nucleotide (45-mer). In some embodiment, the ASO is the pentatetracontasodium salt of a 46-nucleotide (46-mer). In some embodiment, the ASO is the hexatetracontasodium salt of a 47-nucleotide (47-mer). In some embodiment, the ASO is the heptatetracontasodium salt of a 48-nucleotide (48-mer). In some embodiment, the ASO is the octatetracontasodium salt of a 49-nucleotide (49-mer). In some embodiment, the ASO is the nonatetracontasodium salt of a 50-nucleotide (50-mer). In some embodiment, the ASO is the pentacontasodium salt of a 51-nucleotide (51-mer).

[0345] In some embodiment, the ASO is the monosodium salt of a 2-nucleotide (2-mer), fully phosphorothioate-linked oligonucleotide. In some embodiment, the ASO is the disodium salt of a 3-nucleotide (3-mer), fully phosphorothioate-linked oligonucleotide. In some embodiment, the ASO is the trisodium salt of a 4-nucleotide (4-mer), fully phosphorothioate-linked oligonucleotide. In some embodiment, the ASO is the tetrasodium salt of a 5-nucleotide (5-mer), fully phosphorothioate-linked oligonucleotide. In some embodiment, the ASO is the pentasodium salt of a 6-nucleotide (6-mer), fully phosphorothioate-linked oligonucleotide. In some embodiment, the ASO is the hexasodium salt of a 7-nucleotide (7-mer), fully phosphorothioate-linked oligonucleotide. In some embodiment, the ASO is the heptasodium salt of a 8-nucleotide (8-mer), fully phosphorothioate-linked oligonucleotide. In some embodiment, the ASO is the octasodium salt of a 9-nucleotide (9-mer), fully phosphorothioate-linked oligonucleotide. In some embodiment, the ASO is the nonasodium salt of a 10-nucleotide (10-mer), fully phosphorothioate-linked oligonucleotide. In some embodiment, the ASO is the decasodium salt of a 11-nucleotide (11-mer), fully phosphorothioate-linked oligonucleotide. In some embodiment, the ASO is the undecasodium salt of a 12-nucleotide (12-mer), fully phosphorothioate-linked oligonucleotide. In some embodiment, the ASO is the dodecasodium salt of a 13-nucleotide (13-mer), fully phosphorothioate-linked oligonucleotide. In some embodiment, the ASO is the tridecasodium salt of a 14-nucleotide (14-mer), fully phosphorothioate-linked oligonucleotide. In some embodiment, the ASO is the tetradecasodium salt of a 15-nucleotide (15-mer), fully phosphorothioate-linked oligonucleotide. In some embodiment, the ASO is the pentadecasodium salt of a 16-nucleotide (16-mer), fully phosphorothioate-linked oligonucleotide. In some embodiment, the ASO is the hexadecasodium salt of a 17-nucleotide (17-mer), fully phosphorothioate-linked oligonucleotide. In some embodiment, the ASO is the heptadecasodium salt of a 18-nucleotide (18-mer), fully phosphorothioate-linked oligonucleotide. In some embodiment, the ASO is the octadecasodium salt of a 19-nucleotide (19-mer), fully phosphorothioate-linked oligonucleotide. In some embodiment, the ASO is the nonadecasodium salt of a 20-nucleotide (20-mer), fully phosphorothioate-linked oligonucleotide. In some embodiment, the ASO is the icosasodium salt of a 21-nucleotide (21-mer), fully phosphorothioate-linked oligonucleotide. In some embodiment, the ASO is the henicosasodium salt of a 22-nucleotide (22-mer), fully phosphorothioate-linked oligonucleotide. In some embodiment, the ASO is the docosasodium salt of a 23-nucleotide (23-mer), fully phosphorothioate-linked oligonucleotide. In some embodiment, the ASO is the tricosasodium salt of a 24-nucleotide (24-mer), fully phosphorothioate-linked oligonucleotide. In some embodiment, the ASO is the tetracosasodium salt of a 25-nucleotide (25-mer), fully phosphorothioate-linked oligonucleotide. In some embodiment, the ASO is the pentacosasodium salt of a 26-nucleotide (26-mer), fully phosphorothioate-linked oligonucleotide. In some embodiment, the ASO is the hexacosasodium salt of a 27-nucleotide (27-mer), fully phosphorothioate-linked oligonucleotide. In some embodiment, the ASO is the heptacosasodium salt of a 28-nucleotide (28-mer), fully phosphorothioate-linked oligonucleotide. In some embodiment, the ASO is the octacosasodium salt of a 29-nucleotide (29-mer), fully phosphorothioate-linked oligonucleotide. In some embodiment, the ASO is the nonacosasodium salt of a 30-nucleotide (30-mer), fully phosphorothioate-linked oligonucleotide. In some embodiment, the ASO is the triacontasodium salt of a 31-nucleotide (31-mer), fully phosphorothioate-linked oligonucleotide. In some embodiment, the ASO is the hentriacontasodium salt of a 32-nucleotide (32-mer), fully phosphorothioate-linked oligonucleotide. In some embodiment, the ASO is the dotriacontasodium salt of a 33-nucleotide (33-mer), fully phosphorothioate-linked oligonucleotide. In some embodiment, the ASO is the tritriacontasodium salt of a 34-nucleotide (34-mer), fully phosphorothioate-linked oligonucleotide. In some embodiment, the ASO is the tetratriacontasodium salt of a 35-nucleotide (35-mer), fully phosphorothioate-linked oligonucleotide. In some embodiment, the ASO is the pentatriacontasodium salt of a 36-nucleotide (36-mer), fully phosphorothioate-linked oligonucleotide. In some embodiment, the ASO is the hexatriacontasodium salt of a 37-nucleotide (37-mer), fully phosphorothioate-linked oligonucleotide. In some embodiment, the ASO is the heptatriacontasodium salt of a 38-nucleotide (38-mer), fully phosphorothioate-linked oligonucleotide. In some embodiment, the ASO is the octatriacontasodium salt of a 39-nucleotide (39-mer), fully phosphorothioate-linked oligonucleotide. In some embodiment, the ASO is the nonatriacontasodium salt of a 40-nucleotide (40-mer), fully phosphorothioate-linked oligonucleotide. In some embodiment, the ASO is the tetracontasodium salt of a 41-nucleotide (41-mer), fully phosphorothioate-linked oligonucleotide. In some embodiment, the ASO is the hentetracontasodium salt of a 42-nucleotide (42-mer), fully phosphorothioate-linked oligonucleotide. In some embodiment, the ASO is the dotetracontasodium salt of a 43-nucleotide (43-mer), fully phosphorothioate-linked oligonucleotide. In some embodiment, the ASO is the tritetracontasodium salt of a 44-nucleotide (44-mer), fully phosphorothioate-linked oligonucleotide. In some embodiment, the ASO is the tetratetracontasodium salt of a 45-nucleotide (45-mer), fully phosphorothioate-linked oligonucleotide. In some embodiment, the ASO is the pentatetracontasodium salt of a 46-nucleotide (46-mer), fully phosphorothioate-linked oligonucleotide. In some embodiment, the ASO is the hexatetracontasodium salt of a 47-nucleotide (47-mer), fully phosphorothioate-linked oligonucleotide. In some embodiment, the ASO is the heptatetracontasodium salt of a 48-nucleotide (48-mer), fully phosphorothioate-linked oligonucleotide. In some embodiment, the ASO is the octatetracontasodium salt of a 49-nucleotide (49-mer), fully phosphorothioate-linked oligonucleotide. In some embodiment, the ASO is the nonatetracontasodium salt of a 50-nucleotide (50-mer), fully phosphorothioate-linked oligonucleotide. In some embodiment, the ASO is the pentacontasodium salt of a 51-nucleotide (51-mer), fully phosphorothioate-linked oligonucleotide.

[0346] In some embodiment, the ASO is the monopotassium salt of a 2-nucleotide (2-mer). In some embodiment, the ASO is the dipotassium salt of a 3-nucleotide (3-mer). In some embodiment, the ASO is the tripotassium salt of a 4-nucleotide (4-mer). In some embodiment, the ASO is the tetrapotassium salt of a 5-nucleotide (5-mer). In some embodiment, the ASO is the pentapotassium salt of a 6-nucleotide (6-mer). In some embodiment, the ASO is the hexapotassium salt of a 7-nucleotide (7-mer). In some embodiment, the ASO is the heptapotassium salt of a 8-nucleotide (8-mer). In some embodiment, the ASO is the octapotassium salt of a 9-nucleotide (9-mer). In some embodiment, the ASO is the nonapotassium salt of a 10-nucleotide (10-mer). In some embodiment, the ASO is the decapotassium salt of a 11-nucleotide (11-mer). In some embodiment, the ASO is the undecapotassium salt of a 12-nucleotide (12-mer). In some embodiment, the ASO is the dodecapotassium salt of a 13-nucleotide (13-mer). In some embodiment, the ASO is the tridecapotassium salt of a 14-nucleotide (14-mer). In some embodiment, the ASO is the tetradecapotassium salt of a 15-nucleotide (15-mer). In some embodiment, the ASO is the pentadecapotassium salt of a 16-nucleotide (16-mer). In some embodiment, the ASO is the hexadecapotassium salt of a 17-nucleotide (17-mer). In some embodiment, the ASO is the heptadecapotassium salt of a 18-nucleotide (18-mer). In some embodiment, the ASO is the octadecapotassium salt of a 19-nucleotide (19-mer). In some embodiment, the ASO is the nonadecapotassium salt of a 20-nucleotide (20-mer). In some embodiment, the ASO is the icosapotassium salt of a 21-nucleotide (21-mer). In some embodiment, the ASO is the henicosapotassium salt of a 22-nucleotide (22-mer). In some embodiment, the ASO is the docosapotassium salt of a 23-nucleotide (23-mer). In some embodiment, the ASO is the tricosapotassium salt of a 24-nucleotide (24-mer). In some embodiment, the ASO is the tetracosapotassium salt of a 25-nucleotide (25-mer). In some embodiment, the ASO is the pentacosapotassium salt of a 26-nucleotide (26-mer). In some embodiment, the ASO is the hexacosapotassium salt of a 27-nucleotide (27-mer). In some embodiment, the ASO is the heptacosapotassium salt of a 28-nucleotide (28-mer). In some embodiment, the ASO is the octacosapotassium salt of a 29-nucleotide (29-mer). In some embodiment, the ASO is the nonacosapotassium salt of a 30-nucleotide (30-mer). In some embodiment, the ASO is the triacontapotassium salt of a 31-nucleotide (31-mer). In some embodiment, the ASO is the hentriacontapotassium salt of a 32-nucleotide (32-mer). In some embodiment, the ASO is the dotriacontapotassium salt of a 33-nucleotide (33-mer). In some embodiment, the ASO is the tritriacontapotassium salt of a 34-nucleotide (34-mer). In some embodiment, the ASO is the tetratriacontapotassium salt of a 35-nucleotide (35-mer). In some embodiment, the ASO is the pentatriacontapotassium salt of a 36-nucleotide (36-mer). In some embodiment, the ASO is the hexatriacontapotassium salt of a 37-nucleotide (37-mer). In some embodiment, the ASO is the heptatriacontapotassium salt of a 38-nucleotide (38-mer). In some embodiment, the ASO is the octatriacontapotassium salt of a 39-nucleotide (39-mer). In some embodiment, the ASO is the nonatriacontapotassium salt of a 40-nucleotide (40-mer). In some embodiment, the ASO is the tetracontapotassium salt of a 41-nucleotide (41-mer). In some embodiment, the ASO is the hentetracontapotassium salt of a 42-nucleotide (42-mer). In some embodiment, the ASO is the dotetracontapotassium salt of a 43-nucleotide (43-mer). In some embodiment, the ASO is the tritetracontapotassium salt of a 44-nucleotide (44-mer). In some embodiment, the ASO is the tetratetracontapotassium salt of a 45-nucleotide (45-mer). In some embodiment, the ASO is the pentatetracontapotassium salt of a 46-nucleotide (46-mer). In some embodiment, the ASO is the hexatetracontapotassium salt of a 47-nucleotide (47-mer). In some embodiment, the ASO is the heptatetracontapotassium salt of a 48-nucleotide (48-mer). In some embodiment, the ASO is the octatetracontapotassium salt of a 49-nucleotide (49-mer). In some embodiment, the ASO is the nonatetracontapotassium salt of a 50-nucleotide (50-mer). In some embodiment, the ASO is the pentacontapotassium salt of a 51-nucleotide (51-mer).

[0347] In some embodiment, the ASO is the monopotassium salt of a 2-nucleotide (2-mer), fully phosphorothioate-linked oligonucleotide. In some embodiment, the ASO is the dipotassium salt of a 3-nucleotide (3-mer), fully phosphorothioate-linked oligonucleotide. In some embodiment, the ASO is the tripotassium salt of a 4-nucleotide (4-mer), fully phosphorothioate-linked oligonucleotide. In some embodiment, the ASO is the tetrapotassium salt of a 5-nucleotide (5-mer), fully phosphorothioate-linked oligonucleotide. In some embodiment, the ASO is the pentapotassium salt of a 6-nucleotide (6-mer), fully phosphorothioate-linked oligonucleotide. In some embodiment, the ASO is the hexapotassium salt of a 7-nucleotide (7-mer), fully phosphorothioate-linked oligonucleotide. In some embodiment, the ASO is the heptapotassium salt of a 8-nucleotide (8-mer), fully phosphorothioate-linked oligonucleotide. In some embodiment, the ASO is the octapotassium salt of a 9-nucleotide (9-mer), fully phosphorothioate-linked oligonucleotide. In some embodiment, the ASO is the nonapotassium salt of a 10-nucleotide (10-mer), fully phosphorothioate-linked oligonucleotide. In some embodiment, the ASO is the decapotassium salt of a 11-nucleotide (11-mer), fully phosphorothioate-linked oligonucleotide. In some embodiment, the ASO is the undecapotassium salt of a 12-nucleotide (12-mer), fully phosphorothioate-linked oligonucleotide. In some embodiment, the ASO is the dodecapotassium salt of a 13-nucleotide (13-mer), fully phosphorothioate-linked oligonucleotide. In some embodiment, the ASO is the tridecapotassium salt of a 14-nucleotide (14-mer), fully phosphorothioate-linked oligonucleotide. In some embodiment, the ASO is the tetradecapotassium salt of a 15-nucleotide (15-mer), fully phosphorothioate-linked oligonucleotide. In some embodiment, the ASO is the pentadecapotassium salt of a 16-nucleotide (16-mer), fully phosphorothioate-linked oligonucleotide. In some embodiment, the ASO is the hexadecapotassium salt of a 17-nucleotide (17-mer), fully phosphorothioate-linked oligonucleotide. In some embodiment, the ASO is the heptadecapotassium salt of a 18-nucleotide (18-mer), fully phosphorothioate-linked oligonucleotide. In some embodiment, the ASO is the octadecapotassium salt of a 19-nucleotide (19-mer), fully phosphorothioate-linked oligonucleotide. In some embodiment, the ASO is the nonadecapotassium salt of a 20-nucleotide (20-mer), fully phosphorothioate-linked oligonucleotide. In some embodiment, the ASO is the icosapotassium salt of a 21-nucleotide (21-mer), fully phosphorothioate-linked oligonucleotide. In some embodiment, the ASO is the henicosapotassium salt of a 22-nucleotide (22-mer), fully phosphorothioate-linked oligonucleotide. In some embodiment, the ASO is the docosapotassium salt of a 23-nucleotide (23-mer), fully phosphorothioate-linked oligonucleotide. In some embodiment, the ASO is the tricosapotassium salt of a 24-nucleotide (24-mer), fully phosphorothioate-linked oligonucleotide. In some embodiment, the ASO is the tetracosapotassium salt of a 25-nucleotide (25-mer), fully phosphorothioate-linked oligonucleotide. In some embodiment, the ASO is the pentacosapotassium salt of a 26-nucleotide (26-mer), fully phosphorothioate-linked oligonucleotide. In some embodiment, the ASO is the hexacosapotassium salt of a 27-nucleotide (27-mer), fully phosphorothioate-linked oligonucleotide. In some embodiment, the ASO is the heptacosapotassium salt of a 28-nucleotide (28-mer), fully phosphorothioate-linked oligonucleotide. In some embodiment, the ASO is the octacosapotassium salt of a 29-nucleotide (29-mer), fully phosphorothioate-linked oligonucleotide. In some embodiment, the ASO is the nonacosapotassium salt of a 30-nucleotide (30-mer), fully phosphorothioate-linked oligonucleotide. In some embodiment, the ASO is the triacontapotassium salt of a 31-nucleotide (31-mer), fully phosphorothioate-linked oligonucleotide. In some embodiment, the ASO is the hentriacontapotassium salt of a 32-nucleotide (32-mer), fully phosphorothioate-linked oligonucleotide. In some embodiment, the ASO is the dotriacontapotassium salt of a 33-nucleotide (33-mer), fully phosphorothioate-linked oligonucleotide. In some embodiment, the ASO is the tritriacontapotassium salt of a 34-nucleotide (34-mer), fully phosphorothioate-linked oligonucleotide. In some embodiment, the ASO is the tetratriacontapotassium salt of a 35-nucleotide (35-mer), fully phosphorothioate-linked oligonucleotide. In some embodiment, the ASO is the pentatriacontapotassium salt of a 36-nucleotide (36-mer), fully phosphorothioate-linked oligonucleotide. In some embodiment, the ASO is the hexatriacontapotassium salt of a 37-nucleotide (37-mer), fully phosphorothioate-linked oligonucleotide. In some embodiment, the ASO is the heptatriacontapotassium salt of a 38-nucleotide (38-mer), fully phosphorothioate-linked oligonucleotide. In some embodiment, the ASO is the octatriacontapotassium salt of a 39-nucleotide (39-mer), fully phosphorothioate-linked oligonucleotide. In some embodiment, the ASO is the nonatriacontapotassium salt of a 40-nucleotide (40-mer), fully phosphorothioate-linked oligonucleotide. In some embodiment, the ASO is the tetracontapotassium salt of a 41-nucleotide (41-mer), fully phosphorothioate-linked oligonucleotide. In some embodiment, the ASO is the hentetracontapotassium salt of a 42-nucleotide (42-mer), fully phosphorothioate-linked oligonucleotide. In some embodiment, the ASO is the dotetracontapotassium salt of a 43-nucleotide (43-mer), fully phosphorothioate-linked oligonucleotide. In some embodiment, the ASO is the tritetracontapotassium salt of a 44-nucleotide (44-mer), fully phosphorothioate-linked oligonucleotide. In some embodiment, the ASO is the tetratetracontapotassium salt of a 45-nucleotide (45-mer), fully phosphorothioate-linked oligonucleotide. In some embodiment, the ASO is the pentatetracontapotassium salt of a 46-nucleotide (46-mer), fully phosphorothioate-linked oligonucleotide. In some embodiment, the ASO is the hexatetracontapotassium salt of a 47-nucleotide (47-mer), fully phosphorothioate-linked oligonucleotide. In some embodiment, the ASO is the heptatetracontapotassium salt of a 48-nucleotide (48-mer), fully phosphorothioate-linked oligonucleotide. In some embodiment, the ASO is the octatetracontapotassium salt of a 49-nucleotide (49-mer), fully phosphorothioate-linked oligonucleotide. In some embodiment, the ASO is the nonatetracontapotassium salt of a 50-nucleotide (50-mer), fully phosphorothioate-linked oligonucleotide. In some embodiment, the ASO is the pentacontapotassium salt of a 51-nucleotide (51-mer), fully phosphorothioate-linked oligonucleotide.

### SCN1A

[0348] The SCN1A gene can encode SCN1A (sodium channel, voltage-gated, type I, alpha subunit) protein, which can also be referred to as alpha-subunit of voltage-gated sodium channel Na_{V}1.1. Also described above, SCN1A mutations in DS are spread across the entire protein. More than 100 novel mutations have been identified throughout the gene with the more debilitating arising de novo. These comprise of truncations (47%), missense (43%), deletions (3%), and splice site mutations (7%). The percentage of subjects carrying SCN1A mutations varies between 33 and 100%. The majority of mutations are novel changes (88%).

[0349] In some embodiments, the methods described herein are used to modulate, e.g., increase or decrease, the production of a functional Na_{V}1.1 protein. As used herein, the term “functional” refers to the amount of activity or function of a Na_{V}1.1 protein that is necessary to eliminate any one or more symptoms of a treated condition, e.g., Dravet syndrome; Epilepsy, generalized, with febrile seizures plus, type 2; Febrile seizures, familial, 3A; Autism; Epileptic encephalopathy, early infantile, 13; Sick sinus syndrome 1; Alzheimer's disease; or SUDEP. In some embodiments, the methods are used to increase the production of a partially functional Na_{V}1.1 protein. As used herein, the term “partially functional” refers to any amount of activity or function of the Na_{V}1.1 protein that is less than the amount of activity or function that is necessary to eliminate or prevent any one or more symptoms of a disease or condition. In some embodiments, a partially functional protein or RNA will have at least 10%, at least 20%, at least 30%, at least 40%, at least 50%, at least 60%, at least 70%, at least 75%, at least 80%, at least 85%, at least 90%, or at least 95% less activity relative to the fully functional protein or RNA.

[0350] In some embodiments, the method is a method of increasing the expression of the Na_{V}1.1 protein by cells of a subject having a NIE containing pre-mRNA encoding the Na_{V}1.1 protein, wherein the subject has Dravet syndrome caused by a deficient amount of activity of Na_{V}1.1 protein, and wherein the deficient amount of the Na_{V}1.1 protein is caused by haploinsufficiency of the Na_{V}1.1 protein. In such an embodiment, the subject has a first allele encoding a functional Na_{V}1.1 protein, and a second allele from which the Na_{V}1.1 protein is not produced. In another such embodiment, the subject has a first allele encoding a functional Na_{V}1.1 protein, and a second allele encoding a nonfunctional Na_{V}1.1 protein. In another such embodiment, the subject has a first allele encoding a functional Na_{V}1.1 protein, and a second allele encoding a partially functional Na_{V}1.1 protein. In some embodiments, the subject expresses a partially functional Na_{V}1.1 protein from one allele, wherein the partially functional Na_{V}1.1 protein is caused by a frameshift mutation, a non-sense mutation, a missense mutation, or a partial gene deletion. In some embodiments, the subject expresses a nonfunctional Na_{V}1.1 protein from one allele, wherein the nonfunctional Na_{V}1.1 protein is caused by a frameshift mutation, a nonsense mutation, a missense mutation, a partial gene deletion, in one allele. In some embodiments, the subject has a SCN1A whole gene deletion, in one allele. In any of these embodiments, the antisense oligomer binds to a targeted portion of the NIE containing pre-mRNA transcribed from the second allele, thereby inducing exon skipping of the pseudo-exon from the pre-mRNA, and causing an increase in the level of mature mRNA encoding functional Na_{V}1.1 protein, and an increase in the expression of the Na_{V}1.1 protein in the cells of the subject.

[0351] In embodiments of the present invention, a subject can have a mutation in SCN1A. Mutations in SCN1A can be spread throughout said gene. Na_{V}1.1 protein can consist of four domains. Said SCN1A domains can have transmembrane segments. Mutations in said Na_{V}1.1 protein may arise throughout said protein. Said Na_{V}1.1 protein may consist of at least two isoforms. Mutations in SCN1A may comprise of R931C, R946C, M934I, R1648C, or R1648H. In some cases, mutations may be observed in a C-terminus of a Na_{V}1.1 protein. Mutations in a Na_{V}1.1 protein may also be found in loops between segments 5 and 6 of the first three domains of said Na_{V}1.1 protein. In some cases, mutations may be observed in an N-terminus of a Na_{V}1.1 protein. Exemplary mutations within SCN1A include, but are not limited to, R222X, R712X, I227S, R1892X, W952X, R1245X, R1407X, W1434R, c.4338+1G>A, 51516X, L1670fsX1678, or K1846fsX1856. Mutations that can be targeted with the present invention may also encode a pore of an ion channel.

[0352] In some embodiments, the methods and compositions described herein can be used to treat DS. In other embodiments, the methods and compositions described herein can be used to treat severe myclonic epilepsy of infancy (SMEI). In other embodiments, the methods and compositions described herein can be used to treat borderline Dravet syndrome; Epilepsy, generalized, with febrile seizures plus, type 2; Febrile seizures, familial, 3A; Migraine, familial hemiplegic, 3; Autism; Epileptic encephalopathy, early infantile, 13; Sick sinus syndrome 1; Alzheimer's disease or SUDEP.

[0353] In related embodiments, the method is a method of using an ASO to increase the expression of a protein or functional RNA. In some embodiments, an ASO is used to increase the expression of Na_{V}1.1 protein in cells of a subject having a NIE containing pre-mRNA encoding Na_{V}1.1 protein, wherein the subject has a deficiency, e.g., Dravet Syndrome (DS) (also known as SMEI); severe myoclonic epilepsy of infancy (SMEI)-borderland (SMEB); Febrile seizure (FS); epilepsy, generalized, with febrile seizures plus (GEFS+); epileptic encephalopathy, early infantile, 13; cryptogenic generalized epilepsy; cryptogenic focal epilepsy; myoclonic-astatic epilepsy; Lennox-Gastaut syndrome; West syndrome; idiopathic spasms; early myoclonic encephalopathy; progressive myoclonic epilepsy; alternating hemiplegia of childhood; unclassified epileptic encephalopathy; sudden unexpected death in epilepsy (SUDEP); sick sinus syndrome 1; early infantile SCN1A encephalopathy; early infantile epileptic encephalopathy (EIEE); or autism, in the amount or function of a Na_{V}1.1 protein. In some embodiments, an ASO is used to increase the expression of Na_{V}1.1 protein in cells of a subject, wherein the subject has a deficiency, e.g., Epileptic encephalopathy, early infantile, 13; in the amount or function of a SCN8A protein. In some embodiments, an ASO is used to increase the expression of Na_{V}1.1 protein in cells of a subject, wherein the subject has a deficiency, e.g., Sick sinus syndrome 1; in the amount or function of a SCN5A protein.

[0354] In some embodiment, the methods and compositions described herein can also be used to treat borderline SMEI. Additionally, the methods and compositions described herein can be used to treat generalized epilepsy with febrile seizures plus (GEFS+). GEFS+ may be associated with mutations in epilepsy-associated ion channel subunits such as SCN1B or GABRG2. The methods and compositions described herein can also be used to treat sodium channelopathies. Sodium channelopathies may be associated with mutations in SCN1A. Sodium channelopathies may also be associated with subunits of SCN1A, such as the beta subunit, SCN1B. In some cases, additional diseases associated with SCN1A mutations may also be treated with the present disclosure. Related SCN1A diseases associated with SCN1A mutations include, but are not limited to, atypical myotonia congenita, hyperkalemic periodic paralysis, and paramyotonia congenita.

[0355] In some embodiments, a subject having any SCN1A mutation known in the art and described in the literature (e.g., by Hamdan, et al., 2009, N. Engl. Med. 360 (6) pp. 599, Mulley, et al., 2005, Hum. Muta. 25, 535-542, of which entire content is incorporated herein by reference) can be treated using the methods and compositions described herein. In some embodiments, the mutation is within any SCN1A intron or exon.

[0356] In some embodiments, the NIE containing pre-mRNA transcript that encodes the protein that is causative of the disease or condition is targeted by the ASOs described herein. In some embodiments, a NIE containing pre-mRNA transcript that encodes a protein that is not causative of the disease is targeted by the ASOs. For example, a disease that is the result of a mutation or deficiency of a first protein in a particular pathway may be ameliorated by targeting a NIE containing pre-mRNA that encodes a second protein, thereby increasing production of the second protein. In some embodiments, the function of the second protein is able to compensate for the mutation or deficiency of the first protein (which is causative of the disease or condition).

[0357] In some embodiments, the subject has:

[0358] (a) a first mutant allele from which
[0359] (i) the Na_{V}1.1 protein is produced at a reduced level compared to production from a wild-type allele,
[0360] (ii) the Na_{V}1.1 protein is produced in a form having reduced function compared to an equivalent wild-type protein, or
[0361] (iii) the Na_{V}1.1 protein or functional RNA is not produced; and

[0362] (b) a second mutant allele from which
[0363] (i) the Na_{V}1.1 protein is produced at a reduced level compared to production from a wild-type allele,
[0364] (ii) the Na_{V}1.1 protein is produced in a form having reduced function compared to an equivalent wild-type protein, or
[0365] (iii) the Na_{V}1.1 protein is not produced, and
   wherein the NIE containing pre-mRNA is transcribed from the first allele and/or the second allele. In these embodiments, the ASO binds to a targeted portion of the NIE containing pre-mRNA transcribed from the first allele or the second allele, thereby inducing exon skipping of the pseudo-exon from the NIE containing pre-mRNA, and causing an increase in the level of mRNA encoding Na_{V}1.1 protein and an increase in the expression of the target protein or functional RNA in the cells of the subject. In these embodiments, the target protein or functional RNA having an increase in expression level resulting from the exon skipping of the pseudo-exon from the NIE containing pre-mRNA is either in a form having reduced function compared to the equivalent wild-type protein (partially-functional), or having full function compared to the equivalent wild-type protein (fully-functional).

[0366] In some embodiments, the level of mRNA encoding Na_{V}1.1 protein is increased 1.1 to 10-fold, when compared to the amount of mRNA encoding Na_{V}1.1 protein that is produced in a control cell, e.g., one that is not treated with the antisense oligomer or one that is treated with an antisense oligomer that does not bind to the targeted portion of the SCN1A NIE containing pre-mRNA.

[0367] In some embodiments, a subject treated using the methods of the present disclosure expresses a mutant Na_{V}1.1 protein from one allele, wherein the mutant Na_{V}1.1 protein is caused by a frameshift mutation, a nonsense mutation, a missense mutation, or a partial gene deletion, and wherein the mutant Na_{V}1.1 protein causes an elevated activity level of Na_{V}1.1. In some embodiments, a subject treated using the methods of the present disclosure expresses an elevated amount of Na_{V}1.1 protein from one allele due to a frameshift mutation, a nonsense mutation, a missense mutation, or a partial gene deletion.

[0368] In some embodiments, a subject treated using the methods of the present disclosure expresses a partially functional Na_{V}1.1 protein from one allele, wherein the partially functional Na_{V}1.1 protein is caused by a frameshift mutation, a nonsense mutation, a missense mutation, or a partial gene deletion. In some embodiments, a subject treated using the methods of the disclosure expresses a nonfunctional Na_{V}1.1 protein from one allele, wherein the nonfunctional Na_{V}1.1 protein is caused by a frameshift mutation, a nonsense mutation, a missense mutation, a partial gene deletion, in one allele. In some embodiments, a subject treated using the methods of the disclosure has a SCN1A whole gene deletion, in one allele.

[0369] In some embodiments, the method is a method of decreasing the expression of the Na_{V}1.1 protein by cells of a subject having a NIE containing pre-mRNA encoding the Na_{V}1.1 protein, and wherein the subject has a gain-of-function mutation in Na_{V}1.1. In such an embodiment, the subject has an allele from which the Na_{V}1.1 protein is produced in an elevated amount or an allele encoding a mutant SCN1A that induces increased activity of Na_{V}1.1 in the cell. In some embodiments, the increased activity of Na_{V}1.1 is characterized by a prolonged or near persistent sodium current mediated by the mutant Na_{V}1.1 channel, a slowing of fast inactivation, a positive shift in steady-state inactivation, higher channel availability during repetitive stimulation, increased non-inactivated depolarization-induced persistent sodium currents, delayed entry into inactivation, accelerated recovery from fast inactivation, and/or rescue of folding defects by incubation at lower temperature or co-expression of interacting proteins.

### Target Transcripts

[0370] Splicing of the identified SCN1A NIE pre-mRNA species to produce functional mature Scn1a mRNA can be induced using a therapeutic agent such as an ASO that stimulates exon skipping of an NIE. Induction of exon skipping can result in inhibition of an NMD pathway. The resulting mature Scn1a mRNA can be translated normally without activating NMD pathway, thereby increasing the amount of Na_{V}1.1 protein in the patient's cells and alleviating symptoms of a condition associated with SCN1A deficiency, such as Dravet Syndrome (DS); Epilepsy, generalized, with febrile seizures plus, type 2; Febrile seizures, familial, 3A; Autism; Epileptic encephalopathy, early infantile, 13; Sick sinus syndrome 1; Alzheimer's disease; or SUDEP.

[0371] In various embodiments, the present disclosure provides a therapeutic agent which can target SCN1A pre-mRNA transcripts to modulate, e.g., enhance or inhibit, splicing or protein expression level. The therapeutic agent can be a small molecule, polynucleotide, or polypeptide. In some embodiments, the therapeutic agent is an ASO. Various regions or sequences on the SCN1A pre-mRNA can be targeted by a therapeutic agent, such as an ASO. In some embodiments, the ASO targets a SCN1A pre-mRNA transcript containing an NIE. In some embodiments, the ASO targets a sequence within an NIE of a SCN1A pre-mRNA transcript. In some embodiments, the ASO targets a sequence upstream (or 5′) from the 5′ end of an NIE (3′ss) of a SCN1A pre-mRNA transcript. In some embodiments, the ASO targets a sequence downstream (or 3′) from the 3′ end of an NIE (5′ss) of a SCN1A pre-mRNA transcript. In some embodiments, the ASO targets a sequence that is within an intron flanking on the 5′ end of the NIE of a SCN1A pre-mRNA transcript. In some embodiments, the ASO targets a sequence that is within an intron flanking the 3′ end of the NIE of a SCN1A pre-mRNA transcript. In some embodiments, the ASO targets a sequence comprising an NIE-intron boundary of a SCN1A pre-mRNA transcript. An NIE-intron boundary can refer to the junction of an intron sequence and an NIE region. The intron sequence can flank the 5′ end of the NIE, or the 3′ end of the NIE. In some embodiments, the ASO targets a sequence within an exon of a SCN1A pre-mRNA transcript. In some embodiments, the ASO targets a sequence within an intron of a SCN1A pre-mRNA transcript. In some embodiments, the ASO targets a sequence comprising both a portion of an intron and a portion of an exon.

[0372] In some embodiments, a therapeutic agent described herein modulates binding of a factor involved in splicing of the pre-mRNA containing an NMD exon. In some embodiments, a therapeutic agent described herein interferes with binding of a factor involved in splicing of the pre-mRNA containing an NMD exon. In some embodiments, a therapeutic agent described herein prevents binding of a factor involved in splicing of the pre-mRNA containing an NMD exon. In some embodiments, a therapeutic agent targets a targeted portion located in an intronic region between two canonical exonic regions of the pre-mRNA containing an NMD exon and encoding Na_{V}1.1, and wherein the intronic region contains the NMD exon. In some embodiments, a therapeutic agent targets a targeted portion at least partially overlaps with the NMD exon. In some embodiments, a therapeutic agent targets a targeted portion that is at least partially overlaps with an intron upstream of the NMD exon. In some embodiments, a therapeutic agent targets a targeted portion within the NMD exon.

[0373] In some embodiments, a therapeutic agent targets a targeted portion comprising at least about 5, 6, 7, 8, 9, 10, 11, 12, 13, 14, 15, 16, 17, 18, 19, 20, 21, 22, 23, 24, 25, 26, 27, 28, 29, 30, or more consecutive nucleotides of the NMD exon. In some embodiments, a therapeutic agent targets a targeted portion comprising at most about 5, 6, 7, 8, 9, 10, 11, 12, 13, 14, 15, 16, 17, 18, 19, 20, 21, 22, 23, 24, 25, 26, 27, 28, 29, 30, or more consecutive nucleotides of the NMD exon. In some embodiments, a therapeutic agent targets a targeted portion comprising about 5, 6, 7, 8, 9, 10, 11, 12, 13, 14, 15, 16, 17, 18, 19, 20, 21, 22, 23, 24, 25, 26, 27, 28, 29, 30, or more consecutive nucleotides of the NMD exon.

[0374] In some embodiments, a therapeutic agent targets a targeted portion proximal to the NMD exon.

[0375] In some embodiments, the ASO targets a sequence from about 4 to about 300 nucleotides upstream (or 5′) from the 5′ end of the NIE. In some embodiments, the ASO targets a sequence from about 1 to about 20 nucleotides, about 20 to about 50 nucleotides, about 50 to about 100 nucleotides, about 100 to about 150 nucleotides, about 150 to about 200 nucleotides, about 200 to about 250 nucleotides, about 250 to about 300, about 250 to about 300 nucleotides, about 350 to about 400 nucleotides, about 450 to about 500 nucleotides, about 550 to about 600 nucleotides, about 650 to about 700 nucleotides, about 750 to about 800 nucleotides, about 850 to about 900 nucleotides, about 950 to about 1000 nucleotides, about 1050 to about 1100 nucleotides, about 1150 to about 1200 nucleotides, about 1250 to about 1300 nucleotides, about 1350 to about 1400 nucleotides, or about 1450 to about 1500 nucleotides upstream (or 5′) from the 5′ end of the NIE region. In some embodiments, the ASO may target a sequence more than 300 nucleotides upstream from the 5′ end of the NIE. In some embodiments, the ASO targets a sequence from about 4 to about 300 nucleotides downstream (or 3′) from the 3′ end of the NIE. In some embodiments, the ASO targets a sequence about 1 to about 20 nucleotides, about 20 to about 50 nucleotides, about 50 to about 100 nucleotides, about 100 to about 150 nucleotides, about 150 to about 200 nucleotides, about 200 to about 250 nucleotides, about 250 to about 300 nucleotides, about 350 to about 400 nucleotides, about 450 to about 500 nucleotides, about 550 to about 600 nucleotides, about 650 to about 700 nucleotides, about 750 to about 800 nucleotides, about 850 to about 900 nucleotides, about 950 to about 1000 nucleotides, about 1050 to about 1100 nucleotides, about 1150 to about 1200 nucleotides, about 1250 to about 1300 nucleotides, about 1350 to about 1400 nucleotides, or about 1450 to about 1500 nucleotides downstream from the 3′ end of the NIE. In some embodiments, the ASO targets a sequence more than 300 nucleotides downstream from the 3′ end of the NIE.

[0376] In some embodiments, the ASO targets a sequence from about 4 to about 300 nucleotides upstream (or 5′) from the 5′ end of the NIE. In some embodiments, the ASO targets a sequence at least about 1 nucleotide, at least about 10 nucleotides, at least about 20 nucleotides, at least about 50 nucleotides, at least about 80 nucleotides, at least about 85 nucleotides, at least about 90 nucleotides, at least about 95 nucleotides, at least about 96 nucleotides, at least about 97 nucleotides, at least about 98 nucleotides, at least about 99 nucleotides, at least about 100 nucleotides, at least about 101 nucleotides, at least about 102 nucleotides, at least about 103 nucleotides, at least about 104 nucleotides, at least about 105 nucleotides, at least about 110 nucleotides, at least about 120 nucleotides, at least about 150 nucleotides, at least about 200 nucleotides, at least about 300 nucleotides, at least about 400 nucleotides, at least about 500 nucleotides, at least about 600 nucleotides, at least about 700 nucleotides, at least about 800 nucleotides, at least about 900 nucleotides, or at least about 1000 nucleotides upstream (or 5′) from the 5′ end of the NIE region. In some embodiments, the ASO targets a sequence about 4 to about 300 nucleotides downstream (or 3′) from the 3′ end of the NIE. In some embodiments, the ASO targets a sequence at least about 1 nucleotide, at least about 10 nucleotides, at least about 20 nucleotides, at least about 50 nucleotides, at least about 80 nucleotides, at least about 85 nucleotides, at least about 90 nucleotides, at least about 95 nucleotides, at least about 96 nucleotides, at least about 97 nucleotides, at least about 98 nucleotides, at least about 99 nucleotides, at least about 100 nucleotides, at least about 101 nucleotides, at least about 102 nucleotides, at least about 103 nucleotides, at least about 104 nucleotides, at least about 105 nucleotides, at least about 110 nucleotides, at least about 120 nucleotides, at least about 150 nucleotides, at least about 200 nucleotides, at least about 300 nucleotides, at least about 400 nucleotides, at least about 500 nucleotides, at least about 600 nucleotides, at least about 700 nucleotides, at least about 800 nucleotides, at least about 900 nucleotides, or at least about 1000 nucleotides downstream from the 3′ end of the NIE. In some embodiments, the ASO targets a sequence more than 300 nucleotides downstream from the 3′ end of the NIE.

[0377] In some embodiments, the ASO targets a sequence from about 4 to about 300 nucleotides upstream (or 5′) from the 5′ end of the NIE. In some embodiments, the ASO targets a sequence at most about 10 nucleotides, at most about 20 nucleotides, at most about 50 nucleotides, at most about 80 nucleotides, at most about 85 nucleotides, at most about 90 nucleotides, at most about 95 nucleotides, at most about 96 nucleotides, at most about 97 nucleotides, at most about 98 nucleotides, at most about 99 nucleotides, at most about 100 nucleotides, at most about 101 nucleotides, at most about 102 nucleotides, at most about 103 nucleotides, at most about 104 nucleotides, at most about 105 nucleotides, at most about 110 nucleotides, at most about 120 nucleotides, at most about 150 nucleotides, at most about 200 nucleotides, at most about 300 nucleotides, at most about 400 nucleotides, at most about 500 nucleotides, at most about 600 nucleotides, at most about 700 nucleotides, at most about 800 nucleotides, at most about 900 nucleotides, at most about 1000 nucleotides, at most about 1100 nucleotides, at most about 1200 nucleotides, at most about 1300 nucleotides, at most about 1400 nucleotides, or at most about 1500 nucleotides upstream (or 5′) from the 5′ end of the NIE region. In some embodiments, the ASO targets a sequence about 4 to about 300 nucleotides downstream (or 3′) from the 3′ end of the NIE. In some embodiments, the ASO targets a sequence at most about 10 nucleotides, at most about 20 nucleotides, at most about 50 nucleotides, at most about 80 nucleotides, at most about 85 nucleotides, at most about 90 nucleotides, at most about 95 nucleotides, at most about 96 nucleotides, at most about 97 nucleotides, at most about 98 nucleotides, at most about 99 nucleotides, at most about 100 nucleotides, at most about 101 nucleotides, at most about 102 nucleotides, at most about 103 nucleotides, at most about 104 nucleotides, at most about 105 nucleotides, at most about 110 nucleotides, at most about 120 nucleotides, at most about 150 nucleotides, at most about 200 nucleotides, at most about 300 nucleotides, at most about 400 nucleotides, at most about 500 nucleotides, at most about 600 nucleotides, at most about 700 nucleotides, at most about 800 nucleotides, at most about 900 nucleotides, or at most about 1000 nucleotides, at most about 1100 nucleotides, at most about 1200 nucleotides, at most about 1300 nucleotides, at most about 1400 nucleotides, or at most about 1500 nucleotides downstream from the 3′ end of the NIE. In some embodiments, the ASO targets a sequence more than 300 nucleotides downstream from the 3′ end of the NIE.

[0378] In some embodiments, the NIE as described herein is located between GRCh37/hg19: chr2:166,863,740 and GRCh37/hg19: chr2:166,863,803, as depicted in FIG. 2. In some embodiments, the 5′ end of the NIE is located at GRCh37/hg19: chr2:166,863,803. In some embodiments, the 3′ end of the NIE is located at GRCh37/hg19: chr2:166,863,740.

[0379] In some embodiments, the ASO targets a sequence from about 4 to about 300 nucleotides upstream (or 5′) from genomic site GRCh37/hg19: chr2:166,863,803. In some embodiments, the ASO targets a sequence about 1 to about 20 nucleotides, about 20 to about 50 nucleotides, about 50 to about 100 nucleotides, about 100 to about 150 nucleotides, about 150 to about 200 nucleotides, about 200 to about 250 nucleotides, about 250 to about 300, about 250 to about 300 nucleotides, about 350 to about 400 nucleotides, about 450 to about 500 nucleotides, about 550 to about 600 nucleotides, about 650 to about 700 nucleotides, about 750 to about 800 nucleotides, about 850 to about 900 nucleotides, about 950 to about 1000 nucleotides, about 1050 to about 1100 nucleotides, about 1150 to about 1200 nucleotides, about 1250 to about 1300 nucleotides, about 1350 to about 1400 nucleotides, or about 1450 to about 1500 nucleotides upstream (or 5′) from genomic site GRCh37/hg19: chr2:166,863,803. In some embodiments, the ASO may target a sequence more than 300 nucleotides upstream from genomic site GRCh37/hg19: chr2:166,863,803. In some embodiments, the ASO targets a sequence from about 4 to about 300 nucleotides downstream (or 3′) from GRCh37/hg19: chr2:166,863,740. In some embodiments, the ASO targets a sequence about 1 to about 20 nucleotides, about 20 to about 50 nucleotides, about 50 to about 100 nucleotides, about 100 to about 150 nucleotides, about 150 to about 200 nucleotides, about 200 to about 250 nucleotides, about 250 to about 300 nucleotides, about 350 to about 400 nucleotides, about 450 to about 500 nucleotides, about 550 to about 600 nucleotides, about 650 to about 700 nucleotides, about 750 to about 800 nucleotides, about 850 to about 900 nucleotides, about 950 to about 1000 nucleotides, about 1050 to about 1100 nucleotides, about 1150 to about 1200 nucleotides, about 1250 to about 1300 nucleotides, about 1350 to about 1400 nucleotides, or about 1450 to about 1500 nucleotides downstream from GRCh37/hg19: chr2:166,863,740. In some embodiments, the ASO targets a sequence more than 300 nucleotides downstream from GRCh37/hg19: chr2: 166,863,740.

[0380] In some embodiments, the ASO targets a sequence from about 4 to about 300 nucleotides upstream (or 5′) from genomic site GRCh37/hg19: chr2:166,863,803. In some embodiments, the ASO targets a sequence at least about 1 nucleotide, at least about 10 nucleotides, at least about 20 nucleotides, at least about 50 nucleotides, at least about 80 nucleotides, at least about 85 nucleotides, at least about 90 nucleotides, at least about 95 nucleotides, at least about 96 nucleotides, at least about 97 nucleotides, at least about 98 nucleotides, at least about 99 nucleotides, at least about 100 nucleotides, at least about 101 nucleotides, at least about 102 nucleotides, at least about 103 nucleotides, at least about 104 nucleotides, at least about 105 nucleotides, at least about 110 nucleotides, at least about 120 nucleotides, at least about 150 nucleotides, at least about 200 nucleotides, at least about 300 nucleotides, at least about 400 nucleotides, at least about 500 nucleotides, at least about 600 nucleotides, at least about 700 nucleotides, at least about 800 nucleotides, at least about 900 nucleotides, or at least about 1000 nucleotides upstream (or 5′) from genomic site GRCh37/hg19: chr2:166,863,803. In some embodiments, the ASO targets a sequence from about 4 to about 300 nucleotides downstream (or 3′) from GRCh37/hg19: chr2:166,863,740. In some embodiments, the ASO targets a sequence at least about 1 nucleotide, at least about 10 nucleotides, at least about 20 nucleotides, at least about 50 nucleotides, at least about 80 nucleotides, at least about 85 nucleotides, at least about 90 nucleotides, at least about 95 nucleotides, at least about 96 nucleotides, at least about 97 nucleotides, at least about 98 nucleotides, at least about 99 nucleotides, at least about 100 nucleotides, at least about 101 nucleotides, at least about 102 nucleotides, at least about 103 nucleotides, at least about 104 nucleotides, at least about 105 nucleotides, at least about 110 nucleotides, at least about 120 nucleotides, at least about 150 nucleotides, at least about 200 nucleotides, at least about 300 nucleotides, at least about 400 nucleotides, at least about 500 nucleotides, at least about 600 nucleotides, at least about 700 nucleotides, at least about 800 nucleotides, at least about 900 nucleotides, or at least about 1000 nucleotides downstream from GRCh37/hg19: chr2:166,863,740. In some embodiments, the ASO targets a sequence more than 300 nucleotides downstream from GRCh37/hg19: chr2:166,863,740.

[0381] In some embodiments, the ASO targets a sequence from about 4 to about 300 nucleotides upstream (or 5′) from genomic site GRCh37/hg19: chr2:166,863,803. In some embodiments, the ASO targets a sequence at most about 10 nucleotides, at most about 20 nucleotides, at most about 50 nucleotides, at most about 80 nucleotides, at most about 85 nucleotides, at most about 90 nucleotides, at most about 95 nucleotides, at most about 96 nucleotides, at most about 97 nucleotides, at most about 98 nucleotides, at most about 99 nucleotides, at most about 100 nucleotides, at most about 101 nucleotides, at most about 102 nucleotides, at most about 103 nucleotides, at most about 104 nucleotides, at most about 105 nucleotides, at most about 110 nucleotides, at most about 120 nucleotides, at most about 150 nucleotides, at most about 200 nucleotides, at most about 300 nucleotides, at most about 400 nucleotides, at most about 500 nucleotides, at most about 600 nucleotides, at most about 700 nucleotides, at most about 800 nucleotides, at most about 900 nucleotides, at most about 1000 nucleotides, at most about 1100 nucleotides, at most about 1200 nucleotides, at most about 1300 nucleotides, at most about 1400 nucleotides, or at most about 1500 nucleotides upstream (or 5′) from genomic site GRCh37/hg19: chr2:166,863,803. In some embodiments, the ASO targets a sequence from about 4 to about 300 nucleotides downstream (or 3′) from GRCh37/hg19: chr2:166,863,740. In some embodiments, the ASO targets a sequence at most about 10 nucleotides, at most about 20 nucleotides, at most about 50 nucleotides, at most about 80 nucleotides, at most about 85 nucleotides, at most about 90 nucleotides, at most about 95 nucleotides, at most about 96 nucleotides, at most about 97 nucleotides, at most about 98 nucleotides, at most about 99 nucleotides, at most about 100 nucleotides, at most about 101 nucleotides, at most about 102 nucleotides, at most about 103 nucleotides, at most about 104 nucleotides, at most about 105 nucleotides, at most about 110 nucleotides, at most about 120 nucleotides, at most about 150 nucleotides, at most about 200 nucleotides, at most about 300 nucleotides, at most about 400 nucleotides, at most about 500 nucleotides, at most about 600 nucleotides, at most about 700 nucleotides, at most about 800 nucleotides, at most about 900 nucleotides, or at most about 1000 nucleotides, at most about 1100 nucleotides, at most about 1200 nucleotides, at most about 1300 nucleotides, at most about 1400 nucleotides, or at most about 1500 nucleotides downstream from GRCh37/hg19: chr2:166,863,740. In some embodiments, the ASO targets a sequence more than 300 nucleotides downstream from GRCh37/hg19: chr2:166,863,740.

[0382] The SCN1A gene (SEQ ID NO. 1) was analyzed for NIE and inclusion of a portion of intron 20 (SEQ ID NO. 4) (this portion is referred as exon 20x throughout the present disclosure) was observed. In some embodiments, the ASOs disclosed herein target a NIE containing pre-mRNA (SEQ ID NO. 2) transcribed from a SCN1A genomic sequence. In some embodiments, the ASO targets a NIE containing pre-mRNA transcript from a SCN1A genomic sequence comprising a portion of intron 20. In some embodiments, the ASO targets a NIE containing pre-mRNA transcript from a SCN1A genomic sequence comprising exon 20x (SEQ ID NO. 6). In some embodiments, the ASO targets a NIE containing pre-mRNA transcript of SEQ ID NO. 2 or 12. In some embodiments, the ASO targets a NIE containing pre-mRNA transcript of SEQ ID NO. 2 or 12 comprising an NIE. In some embodiments, the ASO targets a NIE containing pre-mRNA transcript of SEQ ID NO. 2 comprising exon 20x (SEQ ID NO. 10). In some embodiments, the ASOs disclosed herein target a SCN1A pre-mRNA sequence (SEQ ID NO. 2 or 12). In some embodiments, the ASO targets a SCN1A pre-mRNA sequence comprising an NIE (SEQ ID NO. 10 or 20). In some embodiments, the ASO targets a SCN1A pre-mRNA sequence according to any one of SEQ ID NOs: 7-10 or 17-20. In some embodiments, the ASO has a sequence according to any one of SEQ ID NOs: 21-67. In some embodiments, the ASO has a sequence according to any one of SEQ ID NOs: 68-114. In some embodiments, the ASO has a sequence according to any one of SEQ ID NOs: 115-209. In some embodiments, the ASO has a sequence according to any one of SEQ ID NOs: 210-256. In some embodiments, the ASO has a sequence according to any one of SEQ ID NOs: 257-303. In some embodiments, the ASO has a sequence according to any one of SEQ ID NOs: 304-341. In some embodiments, the ASO has a sequence according to any one of SEQ ID NOs: 342-379. In some embodiments, the ASO has a sequence according to any one of SEQ ID NOs: 380-1099. In some embodiments, the ASO has a sequence according to any one of SEQ ID NOs: 304-1099. In some embodiments, the ASO has a sequence according to any one of the sequences listed in listed in Tables 4a, 4b, 5a, 5b, 6a, 6b, 7, 8a, and 8b.

[0383] In some embodiments, the SCN1A NIE containing pre-mRNA transcript is encoded by a genetic sequence with at least about 80%, 85%, 90%, 95%, 96%, 97%, 98%, 99% or 100% sequence identity to SEQ ID NO.: 1 or 11. In some embodiments, the SCN1A NIE pre-mRNA transcript comprises a sequence with at least about 80%, 85%, 90%, 95%, 96%, 97%, 98%, 99% or 100% sequence identity to any one of SEQ ID NOs.: 2-10 and 12-20.

[0384] In some embodiments, the ASO targets exon 20 of a SCN1A NIE containing pre-mRNA comprising NIE exon 20x. In some embodiments, the ASO targets an exon 21 sequence downstream (or 3′) of NIE exon 20x. In some embodiments, the ASO targets a sequence about 4 to about 300 nucleotides upstream (or 5′) from the 5′ end of exon 20x. In some embodiments, the ASO targets a sequence about 4 to about 300 nucleotides downstream (or 3′) from the 3′ end of exon 20x. In some embodiments, the ASO has a sequence according to any one of SEQ ID NOs: 21-67. In some embodiments, the ASO has a sequence according to any one of SEQ ID NOs: 210-256. In some embodiments, the ASO has a sequence according to any one of SEQ ID NOs: 380-1099. In some embodiments, the ASO has a sequence according to any one of SEQ ID NOs: 304-1099. In some embodiments, the ASO has a sequence according to any one of the sequences listed in listed in Tables 4a, 4b, 5a, 5b, 6a, 6b, 7, 8a, and 8b.

[0385] In some embodiments, the ASO targets a sequence upstream from the 5′ end of an NIE. For ex-ample, ASOs targeting a sequence upstream from the 5′ end of an NIE (e.g. exon 20x in human SCN1A, or exon 21x in mouse SCN1A) can comprise a sequence with at least 80%, 85%, 90%, 95%, 97%, or 100% sequence identity to any one of SEQ ID NOs: 21-38. For another example, ASOs targeting a sequence upstream from the 5′ end of an NIE (e.g. exon 20x in human SCN1A, or exon 21x in mouse SCN1A) can comprise a sequence with at least 80%, 85%, 90%, 95%, 97%, or 100% sequence identity to any one of SEQ ID NOs: 68-85. In some embodiments, the ASOs target a sequence containing a exon-intron boundary (or junction). For example, ASOs targeting a sequence containing an exon-intron boundary can comprise a sequence with at least 80%, 85%, 90%, 95%, 97%, or 100% sequence identity to any one of SEQ ID NOs: 39-41, 51, 52, 228-230, 240, or 241. For another example, ASOs targeting a sequence containing an exon-intron boundary can comprise a sequence with at least 80%, 85%, 90%, 95%, 97%, or 100% sequence identity to any one of SEQ ID NOs: 86-88 and 98-99. In some embodiments, the ASOs target a sequence downstream from the 3′ end of an NIE. For example, ASOs targeting a sequence down-stream from the 3′ end of an NIE (e.g. exon 20x in human SCN1A, or exon 21x in mouse SCN1A) can comprise a sequence with at least 80%, 85%, 90%, 95%, 97%, or 100% sequence identity to any one of SEQ ID NOs: 53-67. For another example, ASOs targeting a sequence downstream from the 3′ end of an NIE (e.g. exon 20x in human SCN1A, or exon 21x in mouse SCN1A) can comprise a sequence with at least 80%, 85%, 90%, 95%, 97%, or 100% sequence identity to any one of SEQ ID NOs: 100-114. In some embodiments, ASOs target a sequence within an NIE. For example, ASOs targeting a sequence within an NIE (e.g. exon 20x in human SCN1A, or exon 21x in mouse SCN1A) can comprise a sequence with at least 80%, 85%, 90%, 95%, 97%, or 100% sequence identity to any one of SEQ ID NOs: 42-50, or 231-239. For an-other example, ASOs targeting a sequence within an NIE (e.g. exon 20x in human SCN1A, or exon 21x in mouse SCN1A) can comprise a sequence with at least 80%, 85%, 90%, 95%, 97%, or 100% sequence identity to any one of SEQ ID NOs: 89-97.

[0386] In some embodiments, the ASO targets exon 20x in a SCN1A NIE containing pre-mRNA comprising exon 20x. In some embodiments, the ASO targets an exon 20x sequence downstream (or 3′) from the 5′ end of the exon 20x of a SCN1A pre-mRNA. In some embodiments, the ASO targets an exon 20x sequence upstream (or 5′) from the 3′ end of the exon 20x of a SCN1A pre-mRNA.

[0387] In some embodiments, the SCN1A NIE containing pre-mRNA transcript comprises a sequence with at least about 80%, 85%, 90%, 95%, 97%, or 100% sequence identity to any one of SEQ ID NOs: 2, 7-10, 12, and 17-20. In some embodiments, SCN1A NIE containing pre-mRNA transcript is encoded by a sequence with at least about 80%, 85%, 90%, 95%, 97%, or 100% sequence identity to SEQ ID NOs: 1, 3-6, 11, and 13-16. In some embodiments, the targeted portion of the pre-mRNA containing an NMD exon and encoding Na_{V}1.1 comprises a sequence with at least 80%, 85%, 90%, 95%, 97%, or 100% sequence identity to a region comprising at least 8 contiguous nucleic acids of SEQ ID NOs: 2, 7-10, 12, and 17-20.

[0388] In some embodiments, the ASO targets a NIE containing pre-mRNA transcript. In some embodiments, the ASO targets a NIE containing pre-mRNA transcript comprising an NIE. In some embodiments, the ASO targets a NIE containing pre-mRNA transcript of comprising exon 20x. In some embodiments, the ASOs disclosed herein target a SCN1A pre-mRNA sequence. In some embodiments, the ASO targets a SCN1A pre-mRNA sequence comprising an NIE. In some embodiments, the ASO targets a SCN1A pre-mRNA sequence. In some embodiments, the ASO has a sequence according to any one of SEQ ID NOs: 21-67, 210-256 or 304-1099. For another example, the ASOs comprise a sequence with at least 80%, 85%, 90%, 95%, 97%, or 100% sequence identity to any one of SEQ ID NOs: 21-67, 210-256 or 304-1099. For another example, the ASOs comprise a sequence with at least 80%, 85%, 90%, 95%, 97%, or 100% sequence identity to any one of the sequences listed in listed in Tables 4a, 4b, 5a, 5b, 6a, 6b, 7, 8a, and 8b.

[0389] In some embodiments, the ASO targets exon 20 of a SCN1A NIE containing pre-mRNA comprising NIE exon 20x. In some embodiments, the ASO targets an exon 21 sequence downstream (or 3′) of NIE exon 20x. In some embodiments, the ASO targets a sequence about 4 to about 300 nucleotides upstream (or 5′) from the 5′ end of exon 20x. In some embodiments, the ASO targets a sequence about 4 to about 300 nucleotides downstream (or 3′) from the 3′ end of exon 20x.

[0390] In some embodiments, the ASO targets a sequence upstream from the 5′ end of an NIE. In some embodiments, the ASOs target a sequence containing a exon-intron boundary (or junction). In some embodiments, the ASOs target a sequence downstream from the 3′ end of an NIE (e.g. exon 20x in human SCN1A, or exon 21x in mouse SCN1A). In some embodiments, ASOs target a sequence within an NIE.

[0391] In some embodiments, the ASO targets exon 20x in a SCN1A NIE containing pre-mRNA comprising exon 20x. In some embodiments, the ASO targets an exon 20x sequence downstream (or 3′) from the 5′ end of the exon 20x of a SCN1A pre-mRNA. In some embodiments, the ASO targets an exon 20x sequence upstream (or 5′) from the 3′ end of the exon 20x of a SCN1A pre-mRNA.

[0392] In some embodiments, the targeted portion of the SCN1A NIE containing pre-mRNA is in intron 1, 2, 3, 4, 5, 6, 7, 8, 9, 10, 11, 12, 13, 14, 15, 16, 17, 18, 19, 20, 21, 22, 23, 24, or 25 (intron numbering corresponding to the mRNA sequence at NM_006920). In some embodiments, hybridization of an ASO to the targeted portion of the NIE pre-mRNA results in exon skipping of at least one of NIE within intron 1, 2, 3, 4, 5, 6, 7, 8, 9, 10, 11, 12, 13, 14, 15, 16, 17, 18, 19, 20, 21, 22, 23, 24, or 25, and subsequently increases Na_{V}1.1 protein production. In some embodiments, hybridization of an ASO to the targeted portion of the NIE pre-mRNA inhibits or blocks exon skipping of at least one of NIE within intron 1, 2, 3, 4, 5, 6, 7, 8, 9, 10, 11, 12, 13, 14, 15, 16, 17, 18, 19, 20, 21, 22, 23, 24, or 25, and subsequently decreases Na_{V}1.1 protein production. In some embodiments, the targeted portion of the SCN1A NIE containing pre-mRNA is in intron 20. One of skill in the art can determine the corresponding intron number in any isoform based on an intron sequence provided herein or using the number provided in reference to the mRNA sequence at NM_006920, NM_001202435, NM_001165964, or NM_001165963. One of skill in the art also can determine the sequences of flanking exons in any SCN1A isoform for targeting using the methods of the invention, based on an intron sequence provided herein or using the intron number provided in reference to the mRNA sequence at NM_006920, NM_001202435, NM_001165964, or NM_001165963.

### Therapeutic Agents

[0393] In various embodiments of the present disclosure, compositions and methods comprising a therapeutic agent are provided to modulate protein expression level of SCN1A. In some embodiments, provided herein are compositions and methods to modulate alternative splicing of SCNA1 pre-mRNA. In some embodiments, provided herein are compositions and methods to induce exon skipping in the splicing of SCN1A pre-mRNA, e.g., to induce skipping of a pseudo-exon during splicing of SCN1A pre-mRNA. In other embodiments, therapeutic agents may be used to induce the inclusion of an exon in order to decrease the protein expression level.

[0394] In some embodiment, a therapeutic agent disclosed herein is a small molecule, a polypeptide, or a polynucleic acid polymer. In some instances, the therapeutic agent is a small molecule. In some instances, the therapeutic agent is a polypeptide. In some instances, the therapeutic agent is a polynucleic acid polymer. In some cases, the therapeutic agent is a repressor agent. In additional cases, the therapeutic agent is an enhancer agent.

[0395] A therapeutic agent disclosed herein can be a NIE repressor agent. A therapeutic agent may comprise a polynucleic acid polymer.

[0396] According to one aspect of the present disclosure, provided herein is a method of treatment or prevention of a condition associated with a functional-Na_{V}1.1 protein deficiency, comprising administering a NIE repressor agent to a subject to increase levels of functional Na_{V}1.1 protein, wherein the agent binds to a region of the pre-mRNA transcript to decrease inclusion of the NIE in the mature transcript. For example, provided herein is a method of treatment or prevention of a condition associated with a functional-Na_{V}1.1 protein deficiency, comprising administering a NIE repressor agent to a subject to increase levels of functional Na_{V}1.1 protein, wherein the agent binds to a region of an intron containing an NIE (e.g., intron 20 in human SCN1A gene) of the pre-mRNA transcript or to a NIE-activating regulatory sequence in the same intron.

[0397] The sequence of the polynucleic acid polymer may be at least 50%, 55%, 60%, 65%, 70%, 75%, 80%, 85%, 90%, 91%, 92%, 93%, 94%, 95%, 96%, 97%, 98%, 99%, or 99.5% complementary to a target sequence of an mRNA transcript, e.g., a partially processed mRNA transcript. The sequence of the polynucleic acid polymer may be 100% complementary to a target sequence of a pre-mRNA transcript.

[0398] The sequence of the polynucleic acid polymer may have 4 or fewer mismatches to a target sequence of the pre-mRNA transcript. The sequence of the polynucleic acid polymer may have 3 or fewer mismatches to a target sequence of the pre-mRNA transcript. The sequence of the polynucleic acid polymer may have 2 or fewer mismatches to a target sequence of the pre-mRNA transcript. The sequence of the polynucleic acid polymer may have 1 or fewer mismatches to a tar-get sequence of the pre-mRNA transcript. The sequence of the polynucleic acid polymer may have no mismatches to a target sequence of the pre-mRNA transcript.

[0399] The polynucleic acid polymer may specifically hybridize to a target sequence of the pre-mRNA transcript. For example, the polynucleic acid polymer may have 91%, 92%, 93%, 94%, 95%, 96%, 97%, 98%, 99%, 99.5% or 100% sequence complementarity to a target sequence of the pre-mRNA transcript. The hybridization may be under high stringent hybridization conditions.

[0400] The polynucleic acid polymer may have a sequence with at least 50%, 55%, 60%, 65%, 70%, 75%, 80%, 85%, 90%, 91%, 92%, 93%, 94%, 95%, 96%, 97%, 98%, 99%, or 99.5% sequence identity to a sequence selected from the group consisting of SEQ ID NOs: 21-67. The polynucleic acid polymer may have a sequence with 100% sequence identity to a sequence selected from the group consisting of SEQ ID NOs: 21-67. In some instances, the polynucleic acid polymer may have a sequence with at least 50%, 55%, 60%, 65%, 70%, 75%, 80%, 85%, 90%, 91%, 92%, 93%, 94%, 95%, 96%, 97%, 98%, 99%, or 99.5% sequence identity to a sequence selected from the group consisting of SEQ ID NOs: 68-114. In some cases, the polynucleic acid polymer may have a sequence with 100% sequence identity to a sequence selected from the group consisting of SEQ ID NOs: 68-114.

[0401] In some instances, the polynucleic acid polymer may have a sequence with at least 50%, 55%, 60%, 65%, 70%, 75%, 80%, 85%, 90%, 91%, 92%, 93%, 94%, 95%, 96%, 97%, 98%, 99%, or 99.5% sequence identity to a sequence selected from the group consisting of SEQ ID NOs: 21-67, 210-256 or 304-1099. In some cases, the polynucleic acid polymer may have a sequence with 100% sequence identity to a sequence selected from the group consisting of SEQ ID NOs: 21-67, 210-256 or 304-1099. In some cases, the polynucleic acid polymer may have a sequence with 100% sequence identity to a sequence selected from the sequences listed in listed in Tables 4a, 4b, 5a, 5b, 6a, 6b, 7, 8a, and 8b.

[0402] In embodiments wherein the NIE repressor agent comprises a polynucleic acid polymer, the polynucleic acid polymer may be about 50 nucleotides in length. The polynucleic acid polymer may be about 45 nucleotides in length. The polynucleic acid polymer may be about 40 nucleotides in length. The polynucleic acid polymer may be about 35 nucleotides in length. The polynucleic acid polymer may be about 30 nucleotides in length. The polynucleic acid polymer may be about 24 nucleotides in length. The polynucleic acid polymer may be about 25 nucleotides in length. The polynucleic acid polymer may be about 20 nucleotides in length. The polynucleic acid polymer may be about 19 nucleotides in length. The polynucleic acid polymer may be about 18 nucleotides in length. The polynucleic acid polymer may be about 17 nucleotides in length. The polynucleic acid polymer may be about 16 nucleotides in length. The polynucleic acid polymer may be about 15 nucleotides in length. The polynucleic acid polymer may be about 14 nucleotides in length. The polynucleic acid polymer may be about 13 nucleotides in length. The polynucleic acid polymer may be about 12 nucleotides in length. The polynucleic acid polymer may be about 11 nucleotides in length. The polynucleic acid polymer may be about 10 nucleotides in length. The polynucleic acid polymer may be between about 10 and about 50 nucleotides in length. The polynucleic acid polymer may be between about 10 and about 45 nucleotides in length. The polynucleic acid polymer may be between about 10 and about 40 nucleotides in length. The polynucleic acid polymer may be between about 10 and about 35 nucleotides in length. The polynucleic acid polymer may be between about 10 and about 30 nucleotides in length. The polynucleic acid polymer may be between about 10 and about 25 nucleotides in length. The polynucleic acid polymer may be between about 10 and about 20 nucleotides in length. The polynucleic acid polymer may be between about 15 and about 25 nucleotides in length. The polynucleic acid polymer may be between about 15 and about 30 nucleotides in length. The polynucleic acid polymer may be between about 12 and about 30 nucleotides in length.

[0403] The sequence of the polynucleic acid polymer may be at least 50%, 55%, 60%, 65%, 70%, 75%, 80%, 85%, 90%, 91%, 92%, 93%, 94%, 95%, 96%, 97%, 98%, 99%, or 99.5% complementary to a target sequence of an mRNA transcript, e.g., a partially processed mRNA transcript. The sequence of the polynucleic acid polymer may be 100% complementary to a target sequence of a pre-mRNA transcript.

[0404] As described herein in various examples, exon 20x in human SCN1A gene is equivalent to exon 21x in mouse SCN1A gene.

[0405] Also within the scope of the present disclosure is a method to identify or validate an NMD-inducing exon in the presence of an NMD inhibitor, for example, cycloheximide.

[0406] Where reference is made to a polynucleic acid polymer sequence, the skilled person will understand that one or more substitutions may be tolerated, optionally two substitutions may be tolerated in the sequence, such that it maintains the ability to hybridize to the target sequence; or where the substitution is in a target sequence, the ability to be recognized as the target sequence. References to sequence identity may be determined by BLAST sequence alignment using standard/default parameters. For example, the sequence may have 99% identity and still function according to the present disclosure. In other embodiments, the sequence may have 98% identity and still function according to the present disclosure. In another embodiment, the sequence may have 95% identity and still function according to the present disclosure. In another embodiment, the sequence may have 90% identity and still function according to the present disclosure.

### Pharmaceutical Compositions

[0407] In some embodiments, the ASO as described herein is solubilized or diluted in an artificial cerebral spinal fluid (aCSF) solution. In some embodiments, the ASO as described herein is solubilized or diluted in an isotonic solution.

[0408] The term “artificial cerebrospinal fluid (aCSF),” as used herein, refers to a biological buffer solution that is commonly used as a vehicle solution for administration of agents to the central nervous system (CNS). aCSF, for instance, closely matches the electrolyte concentrations and physiological compatibility of endogenous CSF to enable a vital environment for neuronal tissue by maintaining the homeostasis, osmolarity, and pH at physiological levels.

[0409] The term “isotonic solution,” as used herein, refers to a solution that contains an electrolyte balance similar to plasma in the bloodstream. Administration of an isotonic solution to a subject or patient may increase the fluid volume of the subject or patient without a fluid shift. Exemplary isotonic solutions include, but are not limited to 0.9% normal saline, lactated Ringer's solution, Ringer's solution, plasmalyte, and 5% Dextrose in water (D₅W).

[0410] The term “hypotonic solution,” as used herein, refers to a solution that has a lower concentration of electrolytes than plasma. Administration of a hypotonic solution, for example, via an intravenous route, may lead to shifting fluid out of the bloodstream to the area of higher concentration in the interstitial and intracellular spaces. Exemplary hypotonic solutions include, but are not limited to, 0.45% normal saline (half normal saline), 0.33% NaCl solution, 0.225% NaCl solution, and 2.5% Dextrose in water (D_{2.5}W).

[0411] The term “hypertonic solution,” as used herein, refers to a solution that has a higher concentration of electrolytes than plasma. Administration of a hypertonic solution, for example, via an intravenous route, may shift fluid from the interstitial and intracellular spaces into the bloodstream to dilute the electrolytes. Exemplary hypertonic solutions include, but are not limited to, 3% NaCl solution, 5% Dextrose in 0.45% NaCl (D₅ ½ NS), 5% Dextrose in 0.9% normal saline (D₅NS), 5% Dextrose in lactated Ringer's solution (D₅LR), 10% Dextrose in water (D₁₀W), 20% Dextrose in water (D₂₀W), and 50% Dextrose in water (D₅₀W).

[0412] In some embodiments, the ASO as described herein is solubilized or diluted in a phosphate-buffered (pH 6.6-7.6) solution. In some embodiments, the ASO as described herein is solubilized or diluted in a phosphate-buffered (pH 6.0-8.0) solution. In some embodiments, the ASO as described herein is solubilized or diluted in a phosphate-buffered (pH 5.0-8.0) solution. In some embodiments, the ASO as described herein is solubilized or diluted in a phosphate-buffered solution with pH 4.5-8.5, pH 4.6-8.5, pH 4.7-8.5, pH 4.8-8.5, pH 4.9-8.5, pH5.0-8.5, pH 5.1-8.5, pH5.2-8.5, pH 5.3-8.5, pH5.4-8.5, pH 5.5-8.5, pH5.6-8.5, pH 5.7-8.5, pH 5.8-8.5, H 5.9-8.5, pH 6.0-8.5, pH 6.1-8.5, pH 6.2-8.5, pH 6.3-8.5, pH 6.4-8.5, pH 6.5-8.5, pH 6.6-8.5, pH 6.7-8.5, pH 6.8-8.5, pH 6.9-8.5, pH 7.0-8.5, pH 7.1-8.5, pH 7.2-8.5, pH 7.3-8.5, pH 7.4-8.5, pH 7.5-8.5, pH 7.6-8.5, pH 7.7-8.5, pH 7.8-8.5, pH 7.9-8.5, pH 8.0-8.5, pH 8.1-8.5, pH 8.2-8.5, pH 8.3-8.5, or pH 8.4-8.5. In some embodiments, the ASO as described herein is solubilized or diluted in a phosphate-buffered solution with pH 4.5-8.3, pH 4.5-8.2, pH 4.5-8.1, pH 4.5-8.0, pH 4.5-7.9, pH 4.5-7.8, pH 4.5-7.7, pH 4.5-7.6, pH 4.5-7.5, pH 4.5-7.4, pH 4.5-7.3, pH 4.5-7.2, pH 4.5-7.1, pH 4.5-7.0, pH 4.5-6.9, pH 4.5-6.8, pH 4.5-6.7, pH 4.5-6.6, pH 4.5-6.5, pH 4.5-6.4, pH 4.5-6.3, pH 4.5-6.2, pH 4.5-6.1, pH 4.5-6.0, pH 4.5-5.9, pH 4.5-5.8, pH 4.5-5.7, pH 4.5-5.6, pH 4.5-5.5, pH 4.5-5.4, pH 4.5-5.3, pH 4.5-5.2, pH 4.5-5.1, pH 4.5-5.0, pH 4.5-4.9, pH 4.5-4.8, pH 4.5-4.7, or pH 4.5-4.6. In some embodiments, the ASO as described herein is solubilized or diluted in a phosphate-buffered solution with pH 6.0-7.6, pH 6.1-7.6, pH 6.2-7.6, pH 6.3-7.6, pH 6.4-7.6, pH 6.5-7.6, pH 6.6-7.6, pH 6.7-7.6, pH 6.8-7.6, pH 6.9-7.6, pH 7.0-7.6, pH 7.1-7.6, pH 7.2-7.6, pH 7.3-7.6, pH 7.4-7.6, or pH 7.5-7.6. In some embodiments, the ASO as described herein is solubilized or diluted in a phosphate-buffered solution with pH 6.6-8.0, pH 6.6-7.9, pH 6.6-7.8, pH 6.6-7.7, pH 6.6-7.6, pH 6.6-7.5, pH 6.6-7.4, pH 6.6-7.3, pH 6.6-7.2, pH 6.6-7.1, pH 6.6-7.0, pH 6.6-6.9, pH 6.6-6.8, or pH 6.6-6.7. In some embodiments, the ASO as described herein is solubilized or diluted in a phosphate-buffered solution with pH 6.0-8.0, pH 6.1-8.0, pH 6.2-8.0, pH 6.3-8.0, pH 6.4-8.0, pH 6.5-8.0, pH 6.6-8.0, pH 6.7-8.0, pH 6.8-8.0, pH 6.9-8.0, pH 7.0-8.0, pH 7.1-8.0, pH 7.2-8.0, pH 7.3-8.0, pH 7.4-8.0, pH 7.5-8.0, pH 7.6-8.0, pH 7.7-8.0, pH 7.8-8.0, or pH 7.9-8.0. In some embodiments, the ASO as described herein is solubilized or diluted in a phosphate-buffered solution with pH 6.0-7.9, pH 6.0-7.8, pH 6.0-7.7, pH 6.0-7.6, pH 6.0-7.5, pH 6.0-7.4, pH 6.0-7.3, pH 6.0-7.2, pH 6.0-7.1, pH 6.0-7.0, pH 6.0-6.9, pH 6.0-6.8, pH 6.0-6.7, pH 6.0-6.6, pH 6.0-6.5, pH 6.0-6.4, pH 6.0-6.3, pH 6.0-6.2, or pH 6.0-6.1. In some embodiments, the ASO as described herein is solubilized or diluted in a phosphate-buffered solution with pH 5.7-8.5, 5.8-8.4, 5.9-8.3, 6.0-8.2, 6.1-8.1, 6.2-8.0, 6.3-7.9, 6.4-7.8, 6.5-7.7, or 6.6-7.6. In some embodiments, the ASO as described herein is solubilized or diluted in a phosphate-buffered solution with pH about 5.0, 5.1, 5.2, 5.3, 5.4, 5.5, 5.6, 5.7, 5.8, 5.9, 6.0. 6.1, 6.2, 6.3, 6.4, 6.5, 6.6, 6.7, 6.8, 6.9, 7.0, 7.1, 7.2, 7.3, 7.4, 7.5, 7.6, 7.7, 7.8, 7.9, or 8.0. In some embodiments, the ASO as described herein is solubilized or diluted in a phosphate-buffered solution with pH 5.0, 5.1, 5.2, 5.3, 5.4, 5.5, 5.6, 5.7, 5.8, 5.9, 6.0. 6.1, 6.2, 6.3, 6.4, 6.5, 6.6, 6.7, 6.8, 6.9, 7.0, 7.1, 7.2, 7.3, 7.4, 7.5, 7.6, 7.7, 7.8, 7.9, or 8.0.

[0413] In some embodiments, the ASO as described herein is solubilized or diluted in a buffer comprising 25-250 mM NaCl.

[0414] In some embodiments, the ASO as described herein is solubilized or diluted in a buffer comprising 25-250, 30-250, 35-250, 40-250, 45-250, 50-250, 55-250, 60-250, 65-250, 70-250, 75-250, 80-250, 85-250, 90-250, 95-250, 100-250, 105-250, 110-250, 115-250, 120-250, 125-250, 130-250, 135-250, 140-250, 145-250, 150-250, 155-250, 160-250, 165-250, 170-250, 175-250, 180-250, 185-250, 190-250, 195-250, 200-250, 205-250, 210-250, 215-250, 220-250, 225-250, 230-250, 235-250, 240-250, or 245-250 mM NaCl. In some embodiments, the ASO as described herein is solubilized or diluted in a buffer comprising 25-245, 25-240, 25-235, 25-230, 25-225, 25-220, 25-215, 25-210, 25-205, 25-200, 25-195, 25-190, 25-185, 25-180, 25-175, 25-170, 25-165, 25-160, 25-155, 25-150, 25-145, 25-140, 25-135, 25-130, 25-125, 25-120, 25-115, 25-110, 25-105, 25-110, 25-105, 25-100, 25-95, 25-90, 25-85, 25-80, 25-75, 25-70, 25-65, 25-60, 25-55, 25-50, 25-45, 25-40, 25-35, or 25-30 mM NaCl. In some embodiments, the ASO as described herein is solubilized or diluted in a buffer comprising 30-245, 35-240, 40-235, 45-230, 50-225, 55-220, 60-215, 65-210, 70-205, 75-200, 80-195, 85-190, 90-185, 95-180, 100-175, 105-170, 110-165, 115-160, 120-155, 125-150, 130-145 or 135-140 mM NaCl. In some embodiments, the ASO as described herein is solubilized or diluted in a buffer comprising 100-140, 101-140, 102-140, 103-140, 104-140, 105-140, 106-140, 107-140, 108-140, 109-140, 110-140, 111-140, 112-140, 113-140, 114-140, 115-140, 116-140, 117-140, 118-140, 119-140, 120-140, 121-140, 122-140, 123-140, 124-140, 125-140, 126-140, 127-140, 128-140, 129-140, 130-140, 131-140, 132-140, 133-140, 134-140, 135-140, 136-140, 137-140, 138-140, or 139-140 mM NaCl. In some embodiments, the ASO as described herein is solubilized or diluted in a buffer comprising 100-139, 100-138, 100-137, 100-136, 100-135, 100-134, 100-133, 100-132, 100-131, 100-130, 100-129, 100-128, 100-127, 100-126, 100-125, 100-124, 100-123, 100-122, 100-121, 100-120, 100-119, 100-118, 100-117, 100-116, 100-115, 100-114, 100-113, 100-112, 100-111, 100-110, 100-109, 100-108, 100-107, 100-106, 100-105, 100-104, 100-103, 100-102, or 100-101 mM NaCl. In some embodiments, the ASO as described herein is solubilized or diluted in a buffer comprising at least 90, 91, 92, 93, 94, 95, 96, 97, 98, 99, 100, 101, 102, 103, 104, 105, 106, 107, 108, 109, 110, 111, 112, 113, 114, 115, 116, 118, 119, 120, 121, 122, 123, 124, 125, 126, 127, 128, 129, 130, 131, 132, 133, 134, 135, 136, 137, 138, 139, or 140 mM NaCl. In some embodiments, the ASO as described herein is solubilized or diluted in a buffer comprising at most 90, 91, 92, 93, 94, 95, 96, 97, 98, 99, 100, 101, 102, 103, 104, 105, 106, 107, 108, 109, 110, 111, 112, 113, 114, 115, 116, 118, 119, 120, 121, 122, 123, 124, 125, 126, 127, 128, 129, 130, 131, 132, 133, 134, 135, 136, 137, 138, 139, or 140 mM NaCl. In some embodiments, the ASO as described herein is solubilized or diluted in a buffer comprising 90, 91, 92, 93, 94, 95, 96, 97, 98, 99, 100, 101, 102, 103, 104, 105, 106, 107, 108, 109, 110, 111, 112, 113, 114, 115, 116, 118, 119, 120, 121, 122, 123, 124, 125, 126, 127, 128, 129, 130, 131, 132, 133, 134, 135, 136, 137, 138, 139, or 140 mM NaCl.

[0415] In some embodiments, the ASO as described herein is solubilized or diluted in a buffer comprising 0.1-20 mM KCl.

[0416] In some embodiments, the ASO as described herein is solubilized or diluted in a buffer comprising 0.1-40, 0.1-39, 0.1-38, 0.1-37, 0.1-36, 0.1-35, 0.1-34, 0.1-33, 0.1-32, 0.1-31, 0.1-30, 0.1-29, 0.1-28, 0.1-27, 0.1-26, 0.1-25, 0.1-24, 0.1-23, 0.1-22, 0.1-21, 0.1-20, 0.1-19, 0.1-18, 0.1-17, 0.1-16, 0.1-15, 0.1-14, 0.1-13, 0.1-12, 0.1-10, 0.1-9, 0.1-8, 0.1-7, 0.1-6, 0.1-5, 0.1-4, 0.1-3, 0.1-2, or 0.1-1 mM KCl. In some embodiments, the ASO as described herein is solubilized or diluted in a buffer comprising 0.2-40, 0.3-40, 0.4-40, 0.5-40, 0.6-40, 0.7-40, 0.8-40, 0.9-40, 1-40, 2-40, 3-40, 4-40, 5-40, 6-40, 7-40, 8-40, 9-40, 10-40, 11-40, 12-40, 13-40, 14-40, 15-40, 16-40, 17-40, 18-40, 19-40, 20-40, 21-40, 22-40, 23-40, 24-40, 25-40, 26-40, 27-40, 28-40, 29-40, 30-40, 31-40, 32-40, 33-40, 34-40, 35-40, 36-40, 37-40, 38-40, or 39-40 mM KCl. In some embodiments, the ASO as described herein is solubilized or diluted in a buffer comprising 0.1-3.5, 0.2-3.5, 0.3-3.5, 0.4-3.5, 0.5-3.5, 0.6-3.5, 0.7-3.5, 0.8-3.5, 0.9-3.5, 1.0-3.5, 1.1-3.5, 1.2-3.5, 1.3-3.5, 1.4-3.5, 1.5-3.5, 1.6-3.5, 1.7-3.5, 1.8-3.5, 1.9-3.5, 2.0-3.5, 2.1-3.5, 2.2-3.5, 2.3-3.5, 2.4-3.5, 2.5-3.5, 2.6-3.5, 2.7-3.5, 2.8-3.5, 2.9-3.5, 3.0-3.5, 3.1-3.5, 3.2-3.5, 3.3-3.5, or 3.4-3.5 mM KCl. In some embodiments, the ASO as described herein is solubilized or diluted in a buffer comprising 0.1-3.4, 0.1-3.3, 0.1-3.2, 0.1-3.1, 0.1-3.0, 0.1-2.9, 0.1-2.8, 0.1-2.7, 0.1-2.6, 0.1-2.5, 0.1-2.4, 0.1-2.3, 0.1-2.2, 0.1-2.1, 0.1-2.0, 0.1-1.9, 0.1-1.8, 0.1-1.7, 0.1-1.6, 0.1-1.5, 0.1-1.4, 0.1-1.3, 0.1-1.2, 0.1-1.1, 0.1-1.0, 0.1-0.9, 0.1-0.8, 0.1-0.7, 0.1-0.6, 0.1-0.5, 0.1-0.4, 0.1-0.3, or 0.1-0.2 mM KCl. In some embodiments, the ASO as described herein is solubilized or diluted in a buffer comprising at least 0.1, 0.2, 0.3, 0.4, 0.5, 0.6, 0.7, 0.8, 0.9, 1.0, 1.1, 1.2, 1.3, 1.4, 1.5, 1.6, 1.7, 1.8, 1.9, 2.0, 2.1, 2.2, 2.3, 2.4, 2.5, 2.6, 2.7, 2.8, 2.9, 3.0, 3.1, 3.2, 3.3, 3.4, or 3.5 mM KCl. In some embodiments, the ASO as described herein is solubilized or diluted in a buffer comprising at most 0.1, 0.2, 0.3, 0.4, 0.5, 0.6, 0.7, 0.8, 0.9, 1.0, 1.1, 1.2, 1.3, 1.4, 1.5, 1.6, 1.7, 1.8, 1.9, 2.0, 2.1, 2.2, 2.3, 2.4, 2.5, 2.6, 2.7, 2.8, 2.9, 3.0, 3.1, 3.2, 3.3, 3.4, or 3.5 mM KCl. In some embodiments, the ASO as described herein is solubilized or diluted in a buffer comprising 0.1, 0.2, 0.3, 0.4, 0.5, 0.6, 0.7, 0.8, 0.9, 1.0, 1.1, 1.2, 1.3, 1.4, 1.5, 1.6, 1.7, 1.8, 1.9, 2.0, 2.1, 2.2, 2.3, 2.4, 2.5, 2.6, 2.7, 2.8, 2.9, 3.0, 3.1, 3.2, 3.3, 3.4, or 3.5 mM KCl.

[0417] In some embodiments, the ASO as described herein is solubilized or diluted in a buffer comprising 0.1-50 mM Na₂HPO₄.

[0418] In some embodiments, the ASO as described herein is solubilized or diluted in a buffer comprising 0.01-100, 0.02-100, 0.03-100, 0.04-100, 0.05-100, 0.06-100, 0.07-100, 0.08-100, 0.09-100, 0.1-100, 0.2-100, 0.3-100, 0.4-100, 0.5-100, 0.6-100, 0.7-100, 0.8-100, 0.9-100, 1-100, 2-100, 3-100, 4-100, 5-100, 6-100, 7-100, 8-100, 9-100, 10-100, 15-100, 20-100, 25-100, 30-100, 35-100, 40-100, 45-100, 50-100, 55-100, 60-100, 65-100, 70-100, 75-100, 80-100, 85-100, 90-100, or 95-100 mM Na₂HPO₄. In some embodiments, the ASO as described herein is solubilized or diluted in a buffer comprising 0.01-95, 0.01-90, 0.01-85, 0.01-80, 0.01-75, 0.01-70, 0.01-65, 0.01-60, 0.01-55, 0.01-50, 0.01-45, 0.01-40, 0.01-35, 0.01-30, 0.01-25, 0.01-20, 0.01-15, 0.01-10, 0.01-9, 0.01-8, 0.01-7, 0.01-6, 0.01-5, 0.01-4, 0.01-3, 0.01-2, 0.01-1, 0.01-0.9, 0.01-0.8, 0.01-0.7, 0.01-0.6, 0.01-0.5, 0.01-0.4, 0.01-0.3, 0.01-0.2, 0.01-0.1, 0.01-0.09, 0.01-0.08, 0.01-0.07, 0.01-0.06, 0.01-0.05, 0.01-0.04, 0.01-0.03, or 0.01-0.02 mM Na₂HPO₄. In some embodiments, the ASO as described herein is solubilized or diluted in a buffer comprising 0.1-3.0, 0.1-2.9, 0.1-2.8, 0.1-2.7, 0.1-2.6, 0.1-2.5, 0.1-2.4, 0.1-2.3, 0.1-2.2, 0.1-2.1, 0.1-2.0, 0.1-1.9, 0.1-1.8, 0.1-1.7, 0.1-1.6, 0.1-1.5, 0.1-1.4, 0.1-1.3, 0.1-1.2, 0.1-1.1, 0.1-1.0, 0.1-0.9, 0.1-0.8, 0.1-0.7, 0.1-0.6, 0.1-0.5, 0.1-0.4, 0.1-0.3, or 0.1-0.2 mM Na₂HPO₄. In some embodiments, the ASO as described herein is solubilized or diluted in a buffer comprising 0.1-3.0, 0.2-3.0, 0.3-3.0, 0.4-3.0, 0.5-3.0, 0.6-3.0, 0.7-3.0, 0.8-3.0, 0.9-3.0, 1.0-3.0, 1.2-3.0, 1.3-3.0, 1.4-3.0, 1.5-3.0, 1.6-3.0, 1.7-3.0, 1.8-3.0, 1.9-3.0, 2.0-3.0, 2.1-3.0, 2.2-3.0, 2.3-3.0, 2.4-3.0, 2.5-3.0, 2.6-3.0, 2.7-3.0, 2.8-3.0, or 2.9-3.0 mM Na₂HPO₄. In some embodiments, the ASO as described herein is solubilized or diluted in a buffer comprising at least 0.1, 0.2, 0.3, 0.4, 0.5, 0.6, 0.7, 0.8, 0.9, 1.0, 1.1, 1.2, 1.3, 1.4, 1.5, 1.6, 1.7, 1.8, 1.9, 2.0, 2.1, 2.2, 2.3, 2.4, 2.5, 2.6, 2.7, 2.8, 2.9, or 3.0 mM Na₂HPO₄. In some embodiments, the ASO as described herein is solubilized or diluted in a buffer comprising at most 0.1, 0.2, 0.3, 0.4, 0.5, 0.6, 0.7, 0.8, 0.9, 1.0, 1.1, 1.2, 1.3, 1.4, 1.5, 1.6, 1.7, 1.8, 1.9, 2.0, 2.1, 2.2, 2.3, 2.4, 2.5, 2.6, 2.7, 2.8, 2.9, or 3.0 mM Na₂HPO₄. In some embodiments, the ASO as described herein is solubilized or diluted in a buffer comprising 0.1, 0.2, 0.3, 0.4, 0.5, 0.6, 0.7, 0.8, 0.9, 1.0, 1.1, 1.2, 1.3, 1.4, 1.5, 1.6, 1.7, 1.8, 1.9, 2.0, 2.1, 2.2, 2.3, 2.4, 2.5, 2.6, 2.7, 2.8, 2.9, or 3.0 mM Na₂HPO₄.

[0419] In some embodiments, the ASO as described herein is solubilized or diluted in a buffer comprising 0.1-50 mM NaH₂PO₄.

[0420] In some embodiments, the ASO as described herein is solubilized or diluted in a buffer comprising 0.01-100, 0.02-100, 0.03-100, 0.04-100, 0.05-100, 0.06-100, 0.07-100, 0.08-100, 0.09-100, 0.1-100, 0.2-100, 0.3-100, 0.4-100, 0.5-100, 0.6-100, 0.7-100, 0.8-100, 0.9-100, 1-100, 2-100, 3-100, 4-100, 5-100, 6-100, 7-100, 8-100, 9-100, 10-100, 15-100, 20-100, 25-100, 30-100, 35-100, 40-100, 45-100, 50-100, 55-100, 60-100, 65-100, 70-100, 75-100, 80-100, 85-100, 90-100, or 95-100 mM NaH₂PO₄. In some embodiments, the ASO as described herein is solubilized or diluted in a buffer comprising 0.01-95, 0.01-90, 0.01-85, 0.01-80, 0.01-75, 0.01-70, 0.01-65, 0.01-60, 0.01-55, 0.01-50, 0.01-45, 0.01-40, 0.01-35, 0.01-30, 0.01-25, 0.01-20, 0.01-15, 0.01-10, 0.01-9, 0.01-8, 0.01-7, 0.01-6, 0.01-5, 0.01-4, 0.01-3, 0.01-2, 0.01-1, 0.01-0.9, 0.01-0.8, 0.01-0.7, 0.01-0.6, 0.01-0.5, 0.01-0.4, 0.01-0.3, 0.01-0.2, 0.01-0.1, 0.01-0.09, 0.01-0.08, 0.01-0.07, 0.01-0.06, 0.01-0.05, 0.01-0.04, 0.01-0.03, or 0.01-0.02 mM NaH₂PO₄. In some embodiments, the ASO as described herein is solubilized or diluted in a buffer comprising 0.1-3.0, 0.1-2.9, 0.1-2.8, 0.1-2.7, 0.1-2.6, 0.1-2.5, 0.1-2.4, 0.1-2.3, 0.1-2.2, 0.1-2.1, 0.1-2.0, 0.1-1.9, 0.1-1.8, 0.1-1.7, 0.1-1.6, 0.1-1.5, 0.1-1.4, 0.1-1.3, 0.1-1.2, 0.1-1.1, 0.1-1.0, 0.1-0.9, 0.1-0.8, 0.1-0.7, 0.1-0.6, 0.1-0.5, 0.1-0.4, 0.1-0.3, or 0.1-0.2 mM NaH₂PO₄. In some embodiments, the ASO as described herein is solubilized or diluted in a buffer comprising 0.1-3.0, 0.2-3.0, 0.3-3.0, 0.4-3.0, 0.5-3.0, 0.6-3.0, 0.7-3.0, 0.8-3.0, 0.9-3.0, 1.0-3.0, 1.2-3.0, 1.3-3.0, 1.4-3.0, 1.5-3.0, 1.6-3.0, 1.7-3.0, 1.8-3.0, 1.9-3.0, 2.0-3.0, 2.1-3.0, 2.2-3.0, 2.3-3.0, 2.4-3.0, 2.5-3.0, 2.6-3.0, 2.7-3.0, 2.8-3.0, or 2.9-3.0 mM NaH₂PO₄. In some embodiments, the ASO as described herein is solubilized or diluted in a buffer comprising at least 0.1, 0.2, 0.3, 0.4, 0.5, 0.6, 0.7, 0.8, 0.9, 1.0, 1.1, 1.2, 1.3, 1.4, 1.5, 1.6, 1.7, 1.8, 1.9, 2.0, 2.1, 2.2, 2.3, 2.4, 2.5, 2.6, 2.7, 2.8, 2.9, or 3.0 mM NaH₂PO₄. In some embodiments, the ASO as described herein is solubilized or diluted in a buffer comprising at most 0.1, 0.2, 0.3, 0.4, 0.5, 0.6, 0.7, 0.8, 0.9, 1.0, 1.1, 1.2, 1.3, 1.4, 1.5, 1.6, 1.7, 1.8, 1.9, 2.0, 2.1, 2.2, 2.3, 2.4, 2.5, 2.6, 2.7, 2.8, 2.9, or 3.0 mM NaH₂PO₄. In some embodiments, the ASO as described herein is solubilized or diluted in a buffer comprising 0.1, 0.2, 0.3, 0.4, 0.5, 0.6, 0.7, 0.8, 0.9, 1.0, 1.1, 1.2, 1.3, 1.4, 1.5, 1.6, 1.7, 1.8, 1.9, 2.0, 2.1, 2.2, 2.3, 2.4, 2.5, 2.6, 2.7, 2.8, 2.9, or 3.0 mM NaH₂PO₄.

[0421] In some embodiments, the ASO as described herein is solubilized or diluted in a buffer comprising 0.1-50 mM CaCl₂.

[0422] In some embodiments, the ASO as described herein is solubilized or diluted in a buffer comprising 0.1-50, 0.2-50, 0.3-50, 0.4-50, 0.5-50, 0.6-50, 0.7-50, 0.8-50, 0.9-50, 1.0-50, −50, 1.1-50, 1.2-50, 1.3-50, 1.4-50, 1.5-50, 1.6-50, 1.7-50, 1.8-50, 1.9-50, 2.0-50, 2.1-50, 2.2-50, 2.3-50, 2.4-50, 2.5-50, 2.6-50, 2.7-50, 2.8-50, 2.9-50, 3.0-50, 3.1-50, 3.2-50, 3.3-50, 3.4-50, 3.5-50, 3.6-50, 3.7-50, 3.8-50, 3.9-50, 4-50, 5-50, 6-50, 7-50, 8-50, 9-50, 10-50, 15-50, 20-50, 25-50, 1 30-50, 35-50, 40-50, or 45-50 mM CaCl₂. In some embodiments, the ASO as described herein is solubilized or diluted in a buffer comprising 0.1-45, 0.1-40, 0.1-35, 0.1-30, 0.1-25, 0.1-20, 0.1-15, 0.1-10, 0.1-5, 0.1-4, 0.1-4.9, 0.1-4.8, 0.1-4.7, 0.1-4.6, 0.1-4.5, 0.1-4.4, 0.1-4.3, 0.1-4.2, 0.1-4.1, 0.1-4.0, 0.1-3.9, 0.1-3.8, 0.1-3.7, 0.1-3.6, 0.1-3.5, 0.1-3.4, 0.1-3.3, 0.1-3.2, 0.1-3.1, 0.1-3.0, 0.1-2.9, 0.1-2.8, 0.1-2.7, 0.1-2.6, 0.1-2.5, 0.1-2.4, 0.1-2.3, 0.1-2.2, 0.1-2.1, 0.1-2.0, 0.1-1.9, 0.1-1.8, 0.1-1.7, 0.1-1.6, 0.1-1.5, 0.1-1.4, 0.1-1.3, 0.1-1.2, 0.1-1.1, 0.1-1.0, 0.1-0.9, 0.1-0.8, 0.1-0.7, 0.1-0.6, 0.1-0.5, 0.1-0.4, 0.1-0.3, or 0.1-0.2 mM CaCl₂. In some embodiments, the ASO as described herein is solubilized or diluted in a buffer comprising at least 1.0, 1.1, 1.2, 1.3, 1.4, 1.5, 1.6, 1.7, 1.8, 1.9, 2.0, 2.1, 2.2, 2.3, 2.4, 2.5, 2.6, 2.7, 2.8, 2.9, 3.0, 3.1, 3.2, 3.3, 3.4, 3.5, 3.6, 3.7, 3.8, 3.9, or 4.0 mM CaCl₂. In some embodiments, the ASO as described herein is solubilized or diluted in a buffer comprising at most 1.0, 1.1, 1.2, 1.3, 1.4, 1.5, 1.6, 1.7, 1.8, 1.9, 2.0, 2.1, 2.2, 2.3, 2.4, 2.5, 2.6, 2.7, 2.8, 2.9, 3.0, 3.1, 3.2, 3.3, 3.4, 3.5, 3.6, 3.7, 3.8, 3.9, or 4.0 mM CaCl₂. In some embodiments, the ASO as described herein is solubilized or diluted in a buffer comprising 1.0, 1.1, 1.2, 1.3, 1.4, 1.5, 1.6, 1.7, 1.8, 1.9, 2.0, 2.1, 2.2, 2.3, 2.4, 2.5, 2.6, 2.7, 2.8, 2.9, 3.0, 3.1, 3.2, 3.3, 3.4, 3.5, 3.6, 3.7, 3.8, 3.9, or 4.0 mM CaCl₂.

[0423] In some embodiments, the ASO as described herein is solubilized or diluted in a buffer comprising 0.1-50 mM MgCl₂.

[0424] In some embodiments, the ASO as described herein is solubilized or diluted in a buffer comprising 0.1-50, 0.2-50, 0.3-50, 0.4-50, 0.5-50, 0.6-50, 0.7-50, 0.8-50, 0.9-50, 1.0-50, −50, 1.1-50, 1.2-50, 1.3-50, 1.4-50, 1.5-50, 1.6-50, 1.7-50, 1.8-50, 1.9-50, 2.0-50, 2.1-50, 2.2-50, 2.3-50, 2.4-50, 2.5-50, 2.6-50, 2.7-50, 2.8-50, 2.9-50, 3.0-50, 3.1-50, 3.2-50, 3.3-50, 3.4-50, 3.5-50, 3.6-50, 3.7-50, 3.8-50, 3.9-50, 4-50, 5-50, 6-50, 7-50, 8-50, 9-50, 10-50, 15-50, 20-50, 25-50, 1 30-50, 35-50, 40-50, or 45-50 mM MgCl₂. In some embodiments, the ASO as described herein is solubilized or diluted in a buffer comprising 0.1-45, 0.1-40, 0.1-35, 0.1-30, 0.1-25, 0.1-20, 0.1-15, 0.1-10, 0.1-5, 0.1-4, 0.1-4.9, 0.1-4.8, 0.1-4.7, 0.1-4.6, 0.1-4.5, 0.1-4.4, 0.1-4.3, 0.1-4.2, 0.1-4.1, 0.1-4.0, 0.1-3.9, 0.1-3.8, 0.1-3.7, 0.1-3.6, 0.1-3.5, 0.1-3.4, 0.1-3.3, 0.1-3.2, 0.1-3.1, 0.1-3.0, 0.1-2.9, 0.1-2.8, 0.1-2.7, 0.1-2.6, 0.1-2.5, 0.1-2.4, 0.1-2.3, 0.1-2.2, 0.1-2.1, 0.1-2.0, 0.1-1.9, 0.1-1.8, 0.1-1.7, 0.1-1.6, 0.1-1.5, 0.1-1.4, 0.1-1.3, 0.1-1.2, 0.1-1.1, 0.1-1.0, 0.1-0.9, 0.1-0.8, 0.1-0.7, 0.1-0.6, 0.1-0.5, 0.1-0.4, 0.1-0.3, or 0.1-0.2 mM MgCl₂. In some embodiments, the ASO as described herein is solubilized or diluted in a buffer comprising at least 0.1, 0.2, 0.3, 0.4, 0.5, 0.6, 0.7, 0.8, 0.9, 1.0, 1.1, 1.2, 1.3, 1.4, 1.5, 1.6, 1.7, 1.8, 1.9, 2.0, 2.1, 2.2, 2.3, 2.4, 2.5, 2.6, 2.7, 2.8, 2.9, 3.0, 3.1, 3.2, 3.3, 3.4, 3.5, 3.6, 3.7, 3.8, 3.9, or 4.0 mM MgCl₂. In some embodiments, the ASO as described herein is solubilized or diluted in a buffer comprising at most 0.1, 0.2, 0.3, 0.4, 0.5, 0.6, 0.7, 0.8, 0.9, 1.0, 1.1, 1.2, 1.3, 1.4, 1.5, 1.6, 1.7, 1.8, 1.9, 2.0, 2.1, 2.2, 2.3, 2.4, 2.5, 2.6, 2.7, 2.8, 2.9, 3.0, 3.1, 3.2, 3.3, 3.4, 3.5, 3.6, 3.7, 3.8, 3.9, or 4.0 mM MgCl₂. In some embodiments, the ASO as described herein is solubilized or diluted in a buffer comprising 0.1, 0.2, 0.3, 0.4, 0.5, 0.6, 0.7, 0.8, 0.9, 1.0, 1.1, 1.2, 1.3, 1.4, 1.5, 1.6, 1.7, 1.8, 1.9, 2.0, 2.1, 2.2, 2.3, 2.4, 2.5, 2.6, 2.7, 2.8, 2.9, 3.0, 3.1, 3.2, 3.3, 3.4, 3.5, 3.6, 3.7, 3.8, 3.9, or 4.0 mM MgCl₂.

[0425] In some embodiments, the ASO is solubilized or diluted in a buffer further comprising 1-100 mM NaHCO₃, 1-100 mM KHCO₃, or a combination thereof.

[0426] In some embodiments, the ASO as described herein is solubilized or diluted in a buffer comprising 1-100 mM NaHCO₃.

[0427] In some embodiments, the ASO as described herein is solubilized or diluted in a buffer comprising 1-99, 1-95, 1-90, 1-85, 1-80, 1-75, 1-70, 1-65, 1-60, 1-55, 1-50, 1-45, 1-40, 1-35, 1-30, 1-25, 1-20, 1-15, 1-10, 1-9, 1-8, 1-7, 1-6, 1-5, 1-4, 1-3, or 1-2 mM NaHCO₃. In some embodiments, the ASO as described herein is solubilized or diluted in a buffer comprising 2-100, 3-100, 4-100, 5-100, 6-100, 7-100, 8-100, 9-100, 10-100, 15-100, 20-100, 25-100, 30-100, 35-100, 40-100, 45-100, 50-100, 55-100, 60-100, 65-100, 70-100, 75-100, 80-100, 85-100, 90-100, or 95-100 mM NaHCO₃. In some embodiments, the ASO as described herein is solubilized or diluted in a buffer comprising 24.0-28.0, 24.0-27.9, 24.0-27.8, 24.0-27.7, 24.0-27.6, 24.0-27.5, 24.0-27.4, 24.0-27.3, 24.0-27.2, 24.0-27.1, 24.0-27.0, 24.0-26.9, 24.0-26.8, 24.0-26.7, 24.0-26.6, 24.0-26.5, 24.0-26.4, 24.0-26.3, 24.0-26.2, 24.0-26.1, 24.0-26.0, 24.0-25.9, 4.0-25.8, 24.0-25.7, 24.0-25.6, 24.0-25.5, 24.0-25.4, 24.0-25.3, 24.0-25.2, 24.0-25.1, 24.0-25.0, 24.0-24.9, 24.0-24.8, 24.0-24.7, 24.0-24.6, 24.0-24.5, 24.0-24.4, 24.0-24.3, 24.0-24.2, or 24.0-24.1 mM NaHCO₃. In some embodiments, the ASO as described herein is solubilized or diluted in a buffer comprising 24.1-28.0, 24.2-28.0, 24.3-28.0, 24.4-28.0, 24.5-28.0, 24.6-28.0, 24.7-28.0, 24.8-28.0, 24.9-28.0, 25.0-28.0, 25.1-28.0, 25.2-28.0, 25.3-28.0, 25.4-28.0, 25.5-28.0, 25.6-28.0, 25.7-28.0, 25.8-28.0, 25.9-28.0, 26.0-28.0, 26.1-28.0, 26.2-28.0, 26.3-28.0, 26.4-28.0, 26.5-28.0, 26.6-28.0, 26.7-28.0, 26.8-28.0, 26.9-28.0, 27.0-28.0, 27.1-28.0, 27.2-28.0, 27.3-28.0, 27.4-28.0, 27.5-28.0, 27.6-28.0, 27.7-28.0, 27.8-28.0, or 27.9-28.0 mM NaHCO₃. In some embodiments, the ASO as described herein is solubilized or diluted in a buffer comprising at least 24.0, 24.1, 24.2, 24.3, 24.4, 24.5, 24.6, 24.7, 24.8, 24.9, 25.0, 25.1, 25.2, 25.3, 25.4, 25.5, 25.6, 25.7, 25.8, 25.9, 26.0, 26.1, 26.2, 26.3, 26.4, 26.5, 26.6, 26.7, 26.8, 26.9, 27.0, 27.1, 27.2, 27.3, 27.4, 27.5, 27.6, 27.7, 27.8, 27.9, or 28.0 mM NaHCO₃. In some embodiments, the ASO as described herein is solubilized or diluted in a buffer comprising at most 24.0, 24.1, 24.2, 24.3, 24.4, 24.5, 24.6, 24.7, 24.8, 24.9, 25.0, 25.1, 25.2, 25.3, 25.4, 25.5, 25.6, 25.7, 25.8, 25.9, 26.1, 26.2, 26.3, 26.4, 26.5, 26.6, 26.7, 26.8, 26.9, 27.0, 27.1, 27.2, 27.3, 27.4, 27.5, 27.6, 27.7, 27.8, 27.9, or 28.0 mM NaHCO₃. In some embodiments, the ASO as described herein is solubilized or diluted in a buffer comprising 24.0, 24.1, 24.2, 24.3, 24.4, 24.5, 24.6, 24.7, 24.8, 24.9, 25.0, 25.1, 25.2, 25.3, 25.4, 25.5, 25.6, 25.7, 25.8, 25.9, 26.1, 26.2, 26.3, 26.4, 26.5, 26.6, 26.7, 26.8, 26.9, 27.0, 27.1, 27.2, 27.3, 27.4, 27.5, 27.6, 27.7, 27.8, 27.9, or 28.0 mM NaHCO₃.

[0428] In some embodiments, the ASO as described herein is solubilized or diluted in a buffer comprising 1-100 mM KHCO₃.

[0429] In some embodiments, the ASO as described herein is solubilized or diluted in a buffer comprising 1-99, 1-95, 1-90, 1-85, 1-80, 1-75, 1-70, 1-65, 1-60, 1-55, 1-50, 1-45, 1-40, 1-35, 1-30, 1-25, 1-20, 1-15, 1-10, 1-9, 1-8, 1-7, 1-6, 1-5, 1-4, 1-3, or 1-2 mM KHCO₃. In some embodiments, the ASO as described herein is solubilized or diluted in a buffer comprising 2-100, 3-100, 4-100, 5-100, 6-100, 7-100, 8-100, 9-100, 10-100, 15-100, 20-100, 25-100, 30-100, 35-100, 40-100, 45-100, 50-100, 55-100, 60-100, 65-100, 70-100, 75-100, 80-100, 85-100, 90-100, or 95-100 mM KHCO₃. In some embodiments, the ASO as described herein is solubilized or diluted in a buffer comprising 24.0-28.0, 24.0-27.9, 24.0-27.8, 24.0-27.7, 24.0-27.6, 24.0-27.5, 24.0-27.4, 24.0-27.3, 24.0-27.2, 24.0-27.1, 24.0-27.0, 24.0-26.9, 24.0-26.8, 24.0-26.7, 24.0-26.6, 24.0-26.5, 24.0-26.4, 24.0-26.3, 24.0-26.2, 24.0-26.1, 24.0-26.0, 24.0-25.9, 4.0-25.8, 24.0-25.7, 24.0-25.6, 24.0-25.5, 24.0-25.4, 24.0-25.3, 24.0-25.2, 24.0-25.1, 24.0-25.0, 24.0-24.9, 24.0-24.8, 24.0-24.7, 24.0-24.6, 24.0-24.5, 24.0-24.4, 24.0-24.3, 24.0-24.2, or 24.0-24.1 mM KHCO₃. In some embodiments, the ASO as described herein is solubilized or diluted in a buffer comprising 24.1-28.0, 24.2-28.0, 24.3-28.0, 24.4-28.0, 24.5-28.0, 24.6-28.0, 24.7-28.0, 24.8-28.0, 24.9-28.0, 25.0-28.0, 25.1-28.0, 25.2-28.0, 25.3-28.0, 25.4-28.0, 25.5-28.0, 25.6-28.0, 25.7-28.0, 25.8-28.0, 25.9-28.0, 26.0-28.0, 26.1-28.0, 26.2-28.0, 26.3-28.0, 26.4-28.0, 26.5-28.0, 26.6-28.0, 26.7-28.0, 26.8-28.0, 26.9-28.0, 27.0-28.0, 27.1-28.0, 27.2-28.0, 27.3-28.0, 27.4-28.0, 27.5-28.0, 27.6-28.0, 27.7-28.0, 27.8-28.0, or 27.9-28.0 mM KHCO₃. In some embodiments, the ASO as described herein is solubilized or diluted in a buffer comprising at least 24.0, 24.1, 24.2, 24.3, 24.4, 24.5, 24.6, 24.7, 24.8, 24.9, 25.0, 25.1, 25.2, 25.3, 25.4, 25.5, 25.6, 25.7, 25.8, 25.9, 26.0, 26.1, 26.2, 26.3, 26.4, 26.5, 26.6, 26.7, 26.8, 26.9, 27.0, 27.1, 27.2, 27.3, 27.4, 27.5, 27.6, 27.7, 27.8, 27.9, or 28.0 mM KHCO₃. In some embodiments, the ASO as described herein is solubilized or diluted in a buffer comprising at most 24.0, 24.1, 24.2, 24.3, 24.4, 24.5, 24.6, 24.7, 24.8, 24.9, 25.0, 25.1, 25.2, 25.3, 25.4, 25.5, 25.6, 25.7, 25.8, 25.9, 26.1, 26.2, 26.3, 26.4, 26.5, 26.6, 26.7, 26.8, 26.9, 27.0, 27.1, 27.2, 27.3, 27.4, 27.5, 27.6, 27.7, 27.8, 27.9, or 28.0 mM KHCO₃. In some embodiments, the ASO as described herein is solubilized or diluted in a buffer comprising 24.0, 24.1, 24.2, 24.3, 24.4, 24.5, 24.6, 24.7, 24.8, 24.9, 25.0, 25.1, 25.2, 25.3, 25.4, 25.5, 25.6, 25.7, 25.8, 25.9, 26.1, 26.2, 26.3, 26.4, 26.5, 26.6, 26.7, 26.8, 26.9, 27.0, 27.1, 27.2, 27.3, 27.4, 27.5, 27.6, 27.7, 27.8, 27.9, or 28.0 mM KHCO₃.

[0430] In some embodiments, the ASO as described herein is solubilized or diluted in a buffer comprising 0-50 mM KH₂PO₄.

[0431] In some embodiments, the ASO as described herein is solubilized or diluted in a buffer comprising 0-100, 0.01-100, 0.02-100, 0.03-100, 0.04-100, 0.05-100, 0.06-100, 0.07-100, 0.08-100, 0.09-100, 0.1-100, 0.2-100, 0.3-100, 0.4-100, 0.5-100, 0.6-100, 0.7-100, 0.8-100, 0.9-100, 1-100, 2-100, 3-100, 4-100, 5-100, 6-100, 7-100, 8-100, 9-100, 10-100, 15-100, 20-100, 25-100, 30-100, 35-100, 40-100, 45-100, 50-100, 55-100, 60-100, 65-100, 70-100, 75-100, 80-100, 85-100, 90-100, or 95-100 mM KH₂PO₄. In some embodiments, the ASO as described herein is solubilized or diluted in a buffer comprising 0-95, 0-90, 0-85, 0-80, 0-75, 0-70, 0-65, 0-60, 0-55, 0-50, 0-45, 0-40, 0-35, 0-30, 0-25, 0-20, 0-15, 0-10, 0-9, 0-8, 0-7, 0-6, 0-5, 0-4, 0-3, 0-2, 0-1, 0-0.9, 0- 0.8, 0-0.7, 0-0.6, 0-0.5, 0-0.4, 0-0.3, 0-0.2, 0-0.1, 0-0.09, 0-0.08, 0-0.07, 0-0.06, 0-0.05, 0-0.04, 0-0.03, or 0-0.02 mM KH₂PO₄. In some embodiments, the ASO as described herein is solubilized or diluted in a buffer comprising 0.01-95, 0.01-90, 0.01-85, 0.01-80, 0.01-75, 0.01-70, 0.01-65, 0.01-60, 0.01-55, 0.01-50, 0.01-45, 0.01-40, 0.01-35, 0.01-30, 0.01-25, 0.01-20, 0.01-15, 0.01-10, 0.01-9, 0.01-8, 0.01-7, 0.01-6, 0.01-5, 0.01-4, 0.01-3, 0.01-2, 0.01-1, 0.01-0.9, 0.01-0.8, 0.01-0.7, 0.01-0.6, 0.01-0.5, 0.01-0.4, 0.01-0.3, 0.01-0.2, 0.01-0.1, 0.01-0.09, 0.01-0.08, 0.01-0.07, 0.01-0.06, 0.01-0.05, 0.01-0.04, 0.01-0.03, or 0.01-0.02 mM KH₂PO₄. In some embodiments, the ASO as described herein is solubilized or diluted in a buffer comprising 0-3.0, 0-2.9, 0-2.8, 0-2.7, 0-2.6, 0-2.5, 0-2.4, 0-2.3, 0-2.2, 0-2.1, 0-2.0, 0-1.9, 0-1.8, 0-1.7, 0-1.6, 0-1.5, 0-1.4, 0-1.3, 0-1.2, 0-1.1, 0-1.0, 0-0.9, 0-0.8, 0-0.7, 0-0.6, 0-0.5, 0-0.4, 0-0.3, or 0-0.2 mM KH₂PO₄. In some embodiments, the ASO as described herein is solubilized or diluted in a buffer comprising 0.1-3.0, 0.1-2.9, 0.1-2.8, 0.1-2.7, 0.1-2.6, 0.1-2.5, 0.1-2.4, 0.1-2.3, 0.1-2.2, 0.1-2.1, 0.1-2.0, 0.1-1.9, 0.1-1.8, 0.1-1.7, 0.1-1.6, 0.1-1.5, 0.1-1.4, 0.1-1.3, 0.1-1.2, 0.1-1.1, 0.1-1.0, 0.1-0.9, 0.1-0.8, 0.1-0.7, 0.1-0.6, 0.1-0.5, 0.1-0.4, 0.1-0.3, or 0.1-0.2 mM KH₂PO₄. In some embodiments, the ASO as described herein is solubilized or diluted in a buffer comprising 0-3.0, 0.1-3.0, 0.2-3.0, 0.3-3.0, 0.4-3.0, 0.5-3.0, 0.6-3.0, 0.7-3.0, 0.8-3.0, 0.9-3.0, 1.0-3.0, 1.2-3.0, 1.3-3.0, 1.4-3.0, 1.5-3.0, 1.6-3.0, 1.7-3.0, 1.8-3.0, 1.9-3.0, 2.0-3.0, 2.1-3.0, 2.2-3.0, 2.3-3.0, 2.4-3.0, 2.5-3.0, 2.6-3.0, 2.7-3.0, 2.8-3.0, or 2.9-3.0 mM KH₂PO₄. In some embodiments, the ASO as described herein is solubilized or diluted in a buffer comprising at least 0, 0.1, 0.2, 0.3, 0.4, 0.5, 0.6, 0.7, 0.8, 0.9, 1.0, 1.1, 1.2, 1.3, 1.4, 1.5, 1.6, 1.7, 1.8, 1.9, 2.0, 2.1, 2.2, 2.3, 2.4, 2.5, 2.6, 2.7, 2.8, 2.9, or 3.0 mM KH₂PO₄. In some embodiments, the ASO as described herein is solubilized or diluted in a buffer comprising at most 0, 0.1, 0.2, 0.3, 0.4, 0.5, 0.6, 0.7, 0.8, 0.9, 1.0, 1.1, 1.2, 1.3, 1.4, 1.5, 1.6, 1.7, 1.8, 1.9, 2.0, 2.1, 2.2, 2.3, 2.4, 2.5, 2.6, 2.7, 2.8, 2.9, or 3.0 mM KH₂PO₄. In some embodiments, the ASO as described herein is solubilized or diluted in a buffer comprising 0.1, 0.2, 0.3, 0.4, 0.5, 0.6, 0.7, 0.8, 0.9, 1.0, 1.1, 1.2, 1.3, 1.4, 1.5, 1.6, 1.7, 1.8, 1.9, 2.0, 2.1, 2.2, 2.3, 2.4, 2.5, 2.6, 2.7, 2.8, 2.9, or 3.0 mM KH₂PO₄.

[0432] In some embodiments, the ASO as described herein is solubilized or diluted in a buffer comprising 0-50 mM NaH₂PO₄.

[0433] In some embodiments, the ASO as described herein is solubilized or diluted in a buffer comprising 0-50, 0-45, 0-40, 0-35, 0-30, 0-25, 0-20, 0-19, 0-18, 0-17, 0-16, 0-15, 0-14, 0-13, 0-12, 0-11, 0-10, 0-9, 0-8, 0-7, 0-6, 0-5, 0-4, 0-3, 0-2, 0-1, 0-0.9, 0-0.8, 0-0.7, 0-0.6, 0-0.5, 0-0.4, 0-0.3, or 0-0.2 mM NaH₂PO₄. In some embodiments, the ASO as described herein is solubilized or diluted in a buffer comprising 0.1-50, 0.1-45, 0.1-40, 0.1-35, 0.1-30, 0.1-25, 0.1-20, 0.1-19, 0.1-18, 0.1-17, 0.1-16, 0.1-15, 0.1-14, 0.1-13, 0.1-12, 0.1-11, 0.1-10, 0.1-9, 0.1-8, 0.1-7, 0.1-6, 0.1-5, 0.1-4, 0.1-3, 0.1-2, 0.1-1, 0.1-0.9, 0.1-0.8, 0.1-0.7, 0.1-0.6, 0.1-0.5, 0.1-0.4, 0.1-0.3, or 0.1-0.2 mM NaH₂PO₄. In some embodiments, the ASO as described herein is solubilized or diluted in a buffer comprising 0-50, 0.1-50, 0.2-50, 0.3-50, 0.4-50, 0.5-50, 0.6-50, 0.7-50, 0.8-50, 0.9-50, 1-50, 2-50, 3-50, 4-50, 5-50, 6-50, 7-50, 8-50, 9-50, 1-50, 11-50, 12-50, 13-50, 14-50, 15-50, 16-50, 17-50, 18-50, 19-50, 20-50, 25-50, 30-50, 35-50, 40-50, or 45-50 mM NaH₂PO₄. In some embodiments, the ASO as described herein is solubilized or diluted in a buffer comprising 0-20, 0.1-20, 0.2-20, 0.3-20, 0.4-20, 0.5-20, 0.6-20, 0.7-20, 0.8-20, 0.9-20, 1-20, 2-20, 3-20, 4-20, 5-20, 6-20, 7-20, 8-20, 9-20, 10-20, 11-20, 12-20, 13-20, 14-20, 15-20, 16-20, 17-20, 18-20, or 19-20 mM NaH₂PO₄. In some embodiments, the ASO as described herein is solubilized or diluted in a buffer comprising at least 0, 0.1, 0.2, 0.3, 0.4, 0.5, 0.6, 0.7, 0.8, 0.9, 1, 2, 3, 4, 5, 6, 7, 8, 9, 10, 11, 12, 13, 14, 15, 16, 17, 18, 19, or 20 mM NaH₂PO₄. In some embodiments, the ASO as described herein is solubilized or diluted in a buffer comprising at most 0, 0.1, 0.2, 0.3, 0.4, 0.5, 0.6, 0.7, 0.8, 0.9, 1, 2, 3, 4, 5, 6, 7, 8, 9, 10, 11, 12, 13, 14, 15, 16, 17, 18, 19, or 20 mM NaH₂PO₄. In some embodiments, the ASO as described herein is solubilized or diluted in a buffer comprising 0, 0.1, 0.2, 0.3, 0.4, 0.5, 0.6, 0.7, 0.8, 0.9, 1, 2, 3, 4, 5, 6, 7, 8, 9, 10, 11, 12, 13, 14, 15, 16, 17, 18, 19, or 20 mM NaH₂PO₄.

[0434] In some embodiments, the ASO is solubilized or diluted in a buffer further comprising carbohydrates. In some embodiments, the carbohydrates comprise D-glucose. In some embodiments, the ASO is solubilized or diluted in a buffer further comprising 1-100 mM D-glucose.

[0435] In some embodiments, the ASO as described herein is solubilized or diluted in a buffer comprising 1-100 mM D-glucose.

[0436] In some embodiments, the ASO as described herein is solubilized or diluted in a buffer comprising 1-100, 1-95, 1-90, 1-85, 1-80, 1-75, 1-70, 1-65, 1-60, 1-55, 1-50, 1-45, 1-40, 1-35, 1-30, 1-29, 1-28, 1-27, 1-26, 1-25, 1-24, 1-23, 1-22, 1-21, 1-20, 1-19, 1-18, 1-17, 1-16, 1-15, 1-14, 1-13, 1-12, 1-11, 1-10, 1-9, 1-8, 1-7, 1-6, 1-5, 1-4, 1-3, or 1-2 mM D-glucose. In some embodiments, the ASO as described herein is solubilized or diluted in a buffer comprising 2-100, 3-100, 4-100, 5-100, 6-100, 7-100, 8-100, 9-100, 10-100, 11-100, 12-100, 13-100, 14-100, 15-100, 16-100, 17-100, 18-100, 19-100, 20-100, 21-100, 22-100, 23-100, 24-100, 25-100, 26-100, 29-100, 28-100, 29-100, 30-100, 35-100, 40-100, 45-100, 50-100, 55-100, 60-100, 65-100, 70-100, 75-100, 80-100, 85-100, 90-100, or 95-100 mM D-glucose. In some embodiments, the ASO as described herein is solubilized or diluted in a buffer comprising 2-30, 3-30, 4-30, 5-30, 6-30, 7-30, 8-30, 9-30, 10-30, 11-30, 12-30, 13-30, 14-30, 15-30, 16-30, 17-30, 18-30, 19-30, 20-30, 21-30, 22-30, 23-30, 24-30, 25-30, 26-30, 27-30, 28-30, or 29-30 mM D-glucose. In some embodiments, the ASO as described herein is solubilized or diluted in a buffer comprising at least 1, 2, 3, 4, 5, 6, 7, 8, 9, 10, 11, 12, 13, 14, 15, 16, 17, 18, 19, 20, 21, 22, 23, 24, 25, 26, 27, 28, 29, or 30 mM D-glucose. In some embodiments, the ASO as described herein is solubilized or diluted in a buffer comprising at most 1, 2, 3, 4, 5, 6, 7, 8, 9, 10, 11, 12, 13, 14, 15, 16, 17, 18, 19, 20, 21, 22, 23, 24, 25, 26, 27, 28, 29, or 30 mM D-glucose. In some embodiments, the ASO as described herein is solubilized or diluted in a buffer comprising 1, 2, 3, 4, 5, 6, 7, 8, 9, 10, 11, 12, 13, 14, 15, 16, 17, 18, 19, 20, 21, 22, 23, 24, 25, 26, 27, 28, 29, or 30 mM D-glucose.

[0437] In some embodiments, the ASO as described herein is solubilized or diluted in a buffer comprising 1-100, 1-95, 1-90, 1-85, 1-80, 1-75, 1-70, 1-65, 1-60, 1-55, 1-50, 1-45, 1-40, 1-35, 1-30, 1-29, 1-28, 1-27, 1-26, 1-25, 1-24, 1-23, 1-22, 1-21, 1-20, 1-19, 1-18, 1-17, 1-16, 1-15, 1-14, 1-13, 1-12, 1-11, 1-10, 1-9, 1-8, 1-7, 1-6, 1-5, 1-4, 1-3, or 1-2 mM glucose. In some embodiments, the ASO as described herein is solubilized or diluted in a buffer comprising 2-100, 3-100, 4-100, 5-100, 6-100, 7-100, 8-100, 9-100, 10-100, 11-100, 12-100, 13-100, 14-100, 15-100, 16-100, 17-100, 18-100, 19-100, 20-100,21-100, 22-100,23-100, 24-100,25-100, 26-100, 29-100, 28-100, 29-100, 30-100, 35-100, 40-100, 45-100, 50-100, 55-100, 60-100, 65-100, 70-100, 75-100, 80-100, 85-100, 90-100, or 95-100 mM glucose. In some embodiments, the ASO as described herein is solubilized or diluted in a buffer comprising 2-30, 3-30, 4-30, 5-30, 6-30, 7-30, 8-30, 9-30, 10-30, 11-30, 12-30, 13-30, 14-30, 15-30, 16-30, 17-30, 18-30, 19-30, 20-30, 21-30, 22-30, 23-30, 24-30, 25-30, 26-30, 27-30, 28-30, or 29-30 mM glucose. In some embodiments, the ASO as described herein is solubilized or diluted in a buffer comprising at least 1, 2, 3, 4, 5, 6, 7, 8, 9, 10, 11, 12, 13, 14, 15, 16, 17, 18, 19, 20, 21, 22, 23, 24, 25, 26, 27, 28, 29, or 30 mM glucose. In some embodiments, the ASO as described herein is solubilized or diluted in a buffer comprising at most 1, 2, 3, 4, 5, 6, 7, 8, 9, 10, 11, 12, 13, 14, 15, 16, 17, 18, 19, 20, 21, 22, 23, 24, 25, 26, 27, 28, 29, or 30 mM glucose. In some embodiments, the ASO as described herein is solubilized or diluted in a buffer comprising 1, 2, 3, 4, 5, 6, 7, 8, 9, 10, 11, 12, 13, 14, 15, 16, 17, 18, 19, 20, 21, 22, 23, 24, 25, 26, 27, 28, 29, or 30 mM glucose.

[0438] In some embodiments, the ASO is solubilized or diluted in a buffer comprising 25-250 mM NaCl, 0.1-20 mM KCl, 0.1-50 mM Na₂HPO₄, 0.1-50 mM NaH₂PO₄, 0.1-50 mM CaCl₂, and 0.1-50 mM MgCl₂.

[0439] In some embodiments, the ASO is solubilized or diluted in a buffer comprising 150 mM NaCl, 3.0 mM KCl, 0.7 mM Na₂HPO₄, 0.3 mM NaH₂PO₄, 0.79 mM MgCl₂, and 1.4 mM CaCl₂.

[0440] In some embodiments, the ASO is solubilized or diluted in a buffer further comprising an antioxidant. In some embodiments, the antioxidant is t-butylhydroxyquinoline (TBHQ), buylated hydroxytolune (BHT), butylated hydroxyanisole (BHA), vitamin E, or any combination thereof. In some embodiments, the ASO is solubilized or diluted in a buffer further comprising an antioxidant, wherein the antioxidant is ascorbic acid (vitamin C), glutathione, lipoic acid, uric acid, carotenes, α-tocopherol (vitamin E), ubiquinol (coenzyme Q), or any combination thereof.

[0441] In some embodiments, the ASO as described herein is solubilized or diluted in a buffer comprising 25-250 mM NaCl, 0.1-20 mM KCl, 0-50 mM KH2PO4, 1-100 mM NaHCO₃, 0-50 mM NaH2PO4, 1-100 mM D-glucose, 0.1-50 mM CaCl₂, 0.1-50 mM MgCl₂, or any combination thereof.

[0442] In some embodiments, the ASO as described herein is solubilized or diluted in a buffer comprising 25-250 mM NaCl, 0.1-20 mM KCl, 0-50 mM KH2PO4, 1-100 mM NaHCO₃, 0-50 mM NaH2PO4, 1-100 mM D-glucose, 0.1-50 mM CaCl₂, and 0.1-50 mM MgCl₂.

[0443] In some embodiments, the ASO as described herein is solubilized or diluted in a buffer comprising 127 mM NaCl, 1.0 mM KCl, 1.2 mM KH₂PO₄, 26 mM NaHCO₃, 10 mM D-glucose, 2.4 mM CaCl₂, and 1.3 mM MgCl₂.

[0444] In some embodiments, the ASO as described herein is solubilized or diluted in a buffer comprising 119 mM NaCl, 26.2 mM NaHCO₃, 2.5 mM KCl, 1 mM NaH₂PO4, 1.3 mM MgCl₂, 10 mM glucose, and 2.5 mM CaCl₂.

[0445] In some embodiments, the pharmaceutical composition does not comprise a preservative. In some embodiments, the pharmaceutical composition comprises a preservative.

[0446] In some embodiments, the ASO as described herein is present in the pharmaceutical composition at a concentration of from 5-250 mg/mL.

[0447] In some embodiments, the ASO as described herein is present in the pharmaceutical composition at a concentration of from 5-250, 5-247.5, 5-245, 5-242.5, 5-240, 5-237.5, 5-235, 5-232.5, 5-230, 5-227.5, 5-225, 5-225.5, 5-220, 5-217.5, 5-215, 5-212.5, 5-210, 5-205.5, 5-205, 5-202.5, 5-200, 5-197.5, 5-195, 5-192.5, 5-190, 5-187.5, 5-185, 5-182.5, 5-180, 5-177.5, 5-175, 5-172.5, 5-170, 5-167.5, 5-165, 5-162.5, 5-160, 5-157.5, 5-155, 5-152.5, 5-150, 5-147.5, 5-145, 5-142.5, 5-140, 5-137.5, 5-135, 5-132.5, 5-130, 5-127.5, 5-125, 5-122.5, 5-120, 5-117.5, 5-115, 5-112.5, 5-110, 5-107.5, 5-105, 5-102.5, 5-100, 5-97.5, 5-95, 5-92.5, 5-90, 5-87.5, 5-85, 5-82.5, 5-80, 5-77.5, 5-75, 5-72.5, 5-70, 5-67.5, 5-65, 5-62.5, 5-60, 5-57.5, 5-55, 5-52.5, 5-50, 5-47.5, 5-45, 5-42.5, 5-40, 5-37.5, 5-35, 5-32.5, 5-30, 5-27.5, 5-25, 5-22.5, 5-20, 5-17.5, 5-15, 5-12.5, or 5-10 mg/mL. In some embodiments, the ASO as described herein is present in the pharmaceutical composition at a concentration of from 10-250, 15-250, 20-250, 25-250, 30-250, 35-250, 40-250, 45-250, 50-250, 55-250, 60-250, 65-250, 70-250, 75-250, 80-250, 85-250, 90-250, 95-250, 100-250, 105-250, 110-250, 115-250, 120-250, 125-250, 130-250, 135-250, 140-250, 145-250, 150-250, 155-250, 160-250, 165-250, 170-250, 175-250, 180-250, 185-250, 190-250, or 195-250, 200-250, 205-250, 210-250, 215-250, 220-250, 225-250, 230-250, 235-250, 240-250, or 245-250 mg/mL. In some embodiments, the ASO as described herein is present in the pharmaceutical composition at a concentration of from at least 1, 2, 3, 4, 5, 6, 7, 8, 9, 10, 11, 12, 13, 14, 15, 16, 17, 18, 19, 20, 21, 22, 23, 24, 25, 26, 27, 28, 29, 30, 31, 32, 33, 34, 35, 36, 37, 38, 39, 40, 41, 42, 43, 44, 45, 46, 47, 48, 49, 50, 51, 52, 53, 54, 55, 56, 57, 58, 59, 60, 61, 62, 63, 64, 65, 66, 67, 68, 69, 70, 71, 72, 73, 74, 75, 76, 77, 78, 79, 80, 81, 82, 83, 84, 85, 86, 87, 88, 89, 90, 91, 92, 93, 94, 95, 96, 97, 98, 99, 100, 101, 102, 103, 104, 105, 106, 107, 108, 109, 110, 111, 112, 113, 114, 115, 116, 117, 118, 119, 120, 121, 122, 123, 124, 125, 126, 127, 128, 129, 130, 131, 132, 133, 134, 135, 136, 137, 138, 139, 140, 141, 142, 143, 144, 145, 146, 147, 148, 149, 150, 151, 152, 153, 154, 155, 156, 157, 158, 159, 160, 161, 162, 163, 164, 165, 166, 167, 168, 169, 170, 171, 172, 173, 174, 175, 176, 177, 178, 179, 180, 181, 182, 183, 184, 185, 186, 187, 188, 189, 190, 191, 192, 193, 194, 195, 196, 197, 198, 199, 200, 210, 211, 212, 213, 214, 215, 216, 217, 218, 219, 220, 221, 222, 223, 224, 225, 226, 227, 228, 229, 230, 231, 232, 233, 234, 235, 236, 237, 238, 239, 240, 241, 242, 243, 244, 245, 246, 247, 248, 249, or 250 mg/mL. In some embodiments, the ASO as described herein is present in the pharmaceutical composition at a concentration of from at most 1, 2, 3, 4, 5, 6, 7, 8, 9, 10, 11, 12, 13, 14, 15, 16, 17, 18, 19, 20, 21, 22, 23, 24, 25, 26, 27, 28, 29, 30, 31, 32, 33, 34, 35, 36, 37, 38, 39, 40, 41, 42, 43, 44, 45, 46, 47, 48, 49, 50, 51, 52, 53, 54, 55, 56, 57, 58, 59, 60, 61, 62, 63, 64, 65, 66, 67, 68, 69, 70, 71, 72, 73, 74, 75, 76, 77, 78, 79, 80, 81, 82, 83, 84, 85, 86, 87, 88, 89, 90, 91, 92, 93, 94, 95, 96, 97, 98, 99, 100, 101, 102, 103, 104, 105, 106, 107, 108, 109, 110, 111, 112, 113, 114, 115, 116, 117, 118, 119, 120, 121, 122, 123, 124, 125, 126, 127, 128, 129, 130, 131, 132, 133, 134, 135, 136, 137, 138, 139, 140, 141, 142, 143, 144, 145, 146, 147, 148, 149, 150, 151, 152, 153, 154, 155, 156, 157, 158, 159, 160, 161, 162, 163, 164, 165, 166, 167, 168, 169, 170, 171, 172, 173, 174, 175, 176, 177, 178, 179, 180, 181, 182, 183, 184, 185, 186, 187, 188, 189, 190, 191, 192, 193, 194, 195, 196, 197, 198, 199, 200, 210, 211, 212, 213, 214, 215, 216, 217, 218, 219, 220, 221, 222, 223, 224, 225, 226, 227, 228, 229, 230, 231, 232, 233, 234, 235, 236, 237, 238, 239, 240, 241, 242, 243, 244, 245, 246, 247, 248, 249, or 250 mg/mL. In some embodiments, the ASO as described herein is present in the pharmaceutical composition at a concentration of from 1, 2, 3, 4, 5, 6, 7, 8, 9, 10, 11, 12, 13, 14, 15, 16, 17, 18, 19, 20, 21, 22, 23, 24, 25, 26, 27, 28, 29, 30, 31, 32, 33, 34, 35, 36, 37, 38, 39, 40, 41, 42, 43, 44, 45, 46, 47, 48, 49, 50, 51, 52, 53, 54, 55, 56, 57, 58, 59, 60, 61, 62, 63, 64, 65, 66, 67, 68, 69, 70, 71, 72, 73, 74, 75, 76, 77, 78, 79, 80, 81, 82, 83, 84, 85, 86, 87, 88, 89, 90, 91, 92, 93, 94, 95, 96, 97, 98, 99, 100, 101, 102, 103, 104, 105, 106, 107, 108, 109, 110, 111, 112, 113, 114, 115, 116, 117, 118, 119, 120, 121, 122, 123, 124, 125, 126, 127, 128, 129, 130, 131, 132, 133, 134, 135, 136, 137, 138, 139, 140, 141, 142, 143, 144, 145, 146, 147, 148, 149, 150, 151, 152, 153, 154, 155, 156, 157, 158, 159, 160, 161, 162, 163, 164, 165, 166, 167, 168, 169, 170, 171, 172, 173, 174, 175, 176, 177, 178, 179, 180, 181, 182, 183, 184, 185, 186, 187, 188, 189, 190, 191, 192, 193, 194, 195, 196, 197, 198, 199, 200, 210, 211, 212, 213, 214, 215, 216, 217, 218, 219, 220, 221, 222, 223, 224, 225, 226, 227, 228, 229, 230, 231, 232, 233, 234, 235, 236, 237, 238, 239, 240, 241, 242, 243, 244, 245, 246, 247, 248, 249, or 250 mg/mL.

[0448] I In some embodiments, the method comprises administering the pharmaceutical composition as a bolus injection. In some embodiments, the method comprises administering the pharmaceutical composition as a bolus injection over 1 to 180 minutes, 175 minutes, 1 to 170 minutes, 1 to 165 minutes, 1 to 160 minutes, 1 to 155 minutes, 1 to 150 minutes, 1 to 145 minutes, 1 to 140 minutes, 1 to 135 minutes, 1 to 130 minutes, 1 to 125 minutes, 1 to 120 minutes, 1 to 115 minutes, 1 to 110 minutes, 1 to 105 minutes, 1 to 100 minutes, 1 to 95 minutes, 1 to 90 minutes, 1 to 85 minutes, 1 to 80 minutes, 1 to 75 minutes, 1 to 70 minutes, 1 to 65 minutes, 1 to 60 minutes, 1 to 55 minutes, 1 to 50 minutes, 1 to 45 minutes, 1 to 40 minutes, 1 to 35 minutes, 1 to 30 minutes, 1 to 25 minutes, 1 to 20 minutes, 1 to 15 minutes, 1 to 10 minutes, 1 to 5 minutes, or 1 to 3 minutes. In some embodiments, the method comprises administering the pharmaceutical composition as a bolus injection using a spinal anesthesia needle.

[0449] In some embodiments, the ASO as described herein is present in the pharmaceutical composition at a concentration of the ASO is present in the pharmaceutical composition at a concentration of from 0.1 mg/mL to 250 mg/mL. In some embodiments, the ASO as described herein is present in the pharmaceutical composition at a concentration of about 0.1 mg/mL, 0.5 mg/mL, 1 mg/mL, 2 mg/mL, 2.5 mg/mL, 3 mg/mL, 4 mg/mL, 5 mg/mL, 6 mg/mL, 7 mg/mL, 8 mg/mL, 9 mg/mL, 10 mg/mL, 11 mg/mL, 12 mg/mL, 13 mg/mL, 14 mg/mL, 15 mg/mL, 16 mg/mL, 17 mg/mL, 18 mg/mL, 19 mg/mL, or 20 mg/mL. In some embodiments, the ASO as described herein is present in the pharmaceutical composition at a concentration of about 30 mg/mL, 40 mg/mL, 50 mg/mL, 60 mg/mL, 70 mg/mL, 80 mg/mL, 90 mg/mL, 100 mg/mL, 110 mg/mL, 120 mg/mL, 130 mg/mL, 140 mg/mL, 150 mg/mL, 160 mg/mL, 170 mg/mL, 180 mg/mL, 190 mg/mL, or 200 mg/mL. In some embodiments, the ASO as described herein is present in the pharmaceutical composition at a concentration of about 11 mg/mL, 22 mg/mL, 33 mg/mL, 44 mg/mL, 55 mg/mL, 66 mg/mL, 77 mg/mL, 88 mg/mL, 99 mg/mL, or 100 mg/mL in the diluent.

[0450] In some embodiments, the ASO as described herein is present in the pharmaceutical composition at a concentration of from 0.1 mg/mL to 250 mg/mL, from 0.2 mg/mL to 250 mg/mL, from 0.3 mg/mL to 250 mg/mL, from 0.4 mg/mL to 250 mg/mL, from 0.5 mg/mL to 250 mg/mL, from 0.6 mg/mL to 250 mg/mL, from 0.7 mg/mL to 250 mg/mL, from 0.8 mg/mL to 250 mg/mL, from 0.9 mg/mL to 250 mg/mL, from 1.0 mg/mL to 250 mg/mL, from 1.1 mg/mL to 250 mg/mL, from 1.2 mg/mL to 250 mg/mL, from 1.3 mg/mL to 250 mg/mL, from 1.4 mg/mL to 250 mg/mL, from 1.5 mg/mL to 250 mg/mL, from 1.6 mg/mL to 250 mg/mL, from 1.7 mg/mL to 250 mg/mL, from 1.8 mg/mL to 250 mg/mL, from 1.9 mg/mL to 250 mg/mL, from 2.0 mg/mL to 250 mg/mL, from 2.1 mg/mL to 250 mg/mL, from 2.2 mg/mL to 250 mg/mL, from 2.3 mg/mL to 250 mg/mL, from 2.4 mg/mL to 250 mg/mL, from 2.5 mg/mL to 250 mg/mL, from 2.6 mg/mL to 250 mg/mL, from 2.7 mg/mL to 250 mg/mL, from 2.8 mg/mL to 250 mg/mL, from 2.9 mg/mL to 250 mg/mL, from 3.0 mg/mL to 250 mg/mL, from 3.1 mg/mL to 250 mg/mL, from 3.2 mg/mL to 250 mg/mL, from 3.3 mg/mL to 250 mg/mL, from 3.4 mg/mL to 250 mg/mL, from 3.5 mg/mL to 250 mg/mL, from 3.6 mg/mL to 250 mg/mL, from 3.7 mg/mL to 250 mg/mL, from 3.8 mg/mL to 250 mg/mL, from 3.9 mg/mL to 250 mg/mL, from 4.0 mg/mL to 250 mg/mL, from 5.0 mg/mL to 250 mg/mL, from 6.0 mg/mL to 250 mg/mL, from 7.0 mg/mL to 250 mg/mL, from 8.0 mg/mL to 250 mg/mL, from 9.0 mg/mL to 250 mg/mL, from 10 mg/mL to 250 mg/mL, from 15 mg/mL to 250 mg/mL, from 20 mg/mL to 250 mg/mL, from 25 mg/mL to 250 mg/mL, from 30 mg/mL to 250 mg/mL, from 35 mg/mL to 250 mg/mL, from 40 mg/mL to 250 mg/mL, from 45 mg/mL to 250 mg/mL, from 50 mg/mL to 250 mg/mL, from 55 mg/mL to 250 mg/mL, from 60 mg/mL to 250 mg/mL, from 65 mg/mL to 250 mg/mL, from 70 mg/mL to 250 mg/mL, from 75 mg/mL to 250 mg/mL, from 80 mg/mL to 250 mg/mL, from 85 mg/mL to 250 mg/mL, from 90 mg/mL to 250 mg/mL, from 95 mg/mL to 250 mg/mL, from 100 mg/mL to 250 mg/mL, from 105 mg/mL to 250 mg/mL, from 110 mg/mL to 250 mg/mL, from 115 mg/mL to 250 mg/mL, from 120 mg/mL to 250 mg/mL, from 125 mg/mL to 250 mg/mL, from 130 mg/mL to 250 mg/mL, from 135 mg/mL to 250 mg/mL, from 140 mg/mL to 250 mg/mL, from 145 mg/mL to 250 mg/mL, from 150 mg/mL to 250 mg/mL, from 155 mg/mL to 250 mg/mL, from 160 mg/mL to 250 mg/mL, from 165 mg/mL to 250 mg/mL, from 170 mg/mL to 250 mg/mL, from 175 mg/mL to 250 mg/mL, from 180 mg/mL to 250 mg/mL, from 185 mg/mL to 250 mg/mL, from 190 mg/mL to 250 mg/mL, from 195 mg/mL to 250 mg/mL, from 200 mg/mL to 250 mg/mL, from 205 mg/mL to 250 mg/mL, from 210 mg/mL to 250 mg/mL, from 215 mg/mL to 250 mg/mL, from 220 mg/mL to 250 mg/mL, from 225 mg/mL to 250 mg/mL, from 230 mg/mL to 250 mg/mL, from 235 mg/mL to 250 mg/mL, from 240 mg/mL to 250 mg/mL, or from 245 mg/mL to 250 mg/mL.

[0451] In some embodiments, the ASO as described herein is present in the pharmaceutical composition at a concentration of from 0.1 mg/mL to 250 mg/mL, from 0.1 mg/mL to 245 mg/mL, from 0.1 mg/mL to 240 mg/mL, from 0.1 mg/mL to 235 mg/mL, from 0.1 mg/mL to 230 mg/mL, from 0.1 mg/mL to 225 mg/mL, from 0.1 mg/mL to 220 mg/mL, from 0.1 mg/mL to 215 mg/mL, from 0.1 mg/mL to 210 mg/mL, from 0.1 mg/mL to 205 mg/mL, from 0.1 mg/mL to 200 mg/mL, from 0.1 mg/mL to 195 mg/mL, from 0.1 mg/mL to 190 mg/mL, from 0.1 mg/mL to 185 mg/mL, from 0.1 mg/mL to 180 mg/mL, from 0.1 mg/mL to 175 mg/mL, from 0.1 mg/mL to 170 mg/mL, from 0.1 mg/mL to 165 mg/mL, from 0.1 mg/mL to 160 mg/mL, from 0.1 mg/mL to 155 mg/mL, from 0.1 mg/mL to 150 mg/mL, from 0.1 mg/mL to 145 mg/mL, from 0.1 mg/mL to 140 mg/mL, from 0.1 mg/mL to 135 mg/mL, from 0.1 mg/mL to 130 mg/mL, from 0.1 mg/mL to 125 mg/mL, from 0.1 mg/mL to 120 mg/mL, from 0.1 mg/mL to 115 mg/mL, from 0.1 mg/mL to 110 mg/mL, from 0.1 mg/mL to 100 mg/mL, from 0.1 mg/mL to 95 mg/mL, from 0.1 mg/mL to 90 mg/mL, from 0.1 mg/mL to 85 mg/mL, from 0.1 mg/mL to 80 mg/mL, from 0.1 mg/mL to 75 mg/mL, from 0.1 mg/mL to 70 mg/mL, from 0.1 mg/mL to 65 mg/mL, from 0.1 mg/mL to 60 mg/mL, from 0.1 mg/mL to 55 mg/mL, from 0.1 mg/mL to 50 mg/mL, from 0.1 mg/mL to 45 mg/mL, from 0.1 mg/mL to 40 mg/mL, from 0.1 mg/mL to 35 mg/mL, from 0.1 mg/mL to 30 mg/mL, from 0.1 mg/mL to 25 mg/mL, from 0.1 mg/mL to 20 mg/mL, from 0.1 mg/mL to 15 mg/mL, from 0.1 mg/mL to 10 mg/mL, from 0.1 mg/mL to 9 mg/mL, from 0.1 mg/mL to 8 mg/mL, from 0.1 mg/mL to 7 mg/mL, from 0.1 mg/mL to 6 mg/mL, from 0.1 mg/mL to 5 mg/mL, from 0.1 mg/mL to 4 mg/mL, from 0.1 mg/mL to 3.9 mg/mL, from 0.1 mg/mL to 3.8 mg/mL, from 0.1 mg/mL to 3.7 mg/mL, from 0.1 mg/mL to 3.6 mg/mL, from 0.1 mg/mL to 3.5 mg/mL, from 0.1 mg/mL to 3.4 mg/mL, from 0.1 mg/mL to 3.3 mg/mL, from 0.1 mg/mL to 3.2 mg/mL, from 0.1 mg/mL to 3.1 mg/mL, from 0.1 mg/mL to 3.0 mg/mL, from 0.1 mg/mL to 2.9 mg/mL, from 0.1 mg/mL to 2.8 mg/mL, from 0.1 mg/mL to 2.7 mg/mL, from 0.1 mg/mL to 2.6 mg/mL, from 0.1 mg/mL to 2.5 mg/mL, from 0.1 mg/mL to 2.4 mg/mL, from 0.1 mg/mL to 2.3 mg/mL, from 0.1 mg/mL to 2.2 mg/mL, from 0.1 mg/mL to 2.1 mg/mL, from 0.1 mg/mL to 2.0 mg/mL, from 0.1 mg/mL to 1.9 mg/mL, from 0.1 mg/mL to 1.8 mg/mL, from 0.1 mg/mL to 1.7 mg/mL, from 0.1 mg/mL to 1.6 mg/mL, from 0.1 mg/mL to 1.5 mg/mL, from 0.1 mg/mL to 1.4 mg/mL, from 0.1 mg/mL to 1.3 mg/mL, from 0.1 mg/mL to 1.2 mg/mL, from 0.1 mg/mL to 1.1 mg/mL, from 0.1 mg/mL to 1.0 mg/mL, from 0.1 mg/mL to 0.9 mg/mL, from 0.1 mg/mL to 0.8 mg/mL, from 0.1 mg/mL to 0.7 mg/mL, from 0.1 mg/mL to 0.6 mg/mL, from 0.1 mg/mL to 0.5 mg/mL, from 0.1 mg/mL to 0.4 mg/mL, from 0.1 mg/mL to 0.3 mg/mL, or from 0.1 mg/mL to 0.2 mg/mL.

[0452] In some embodiments, the ASO as described herein is present in the pharmaceutical composition at a concentration of at least 0.1, 0.2, 0.3, 0.4, 0.5, 0.6, 0.7, 0.8, 0.9, 1.0, 1.1, 1.2, 1.3, 1.4, 1.5, 1.6, 1.7, 1.8, 1.9, 2.0, 2.1, 2.2, 2.3, 2.4, 2.5, 2.6, 2.7, 2.8, 2.9, 3.0, 3.1, 3.2, 3.3, 3.4, 3.5, 3.6, 3.7, 3.8, 3.9, 4.0, 4.1, 4.2, 4.3, 4.4, 4.5, 4.6, 4.7, 4.8, 4.9, 5, 6, 7, 8, 9, 10, 11, 12, 13, 14, 15, 16, 17, 18, 19, 20, 21, 22, 23, 24, 25, 26, 27, 28, 29, 30, 31, 32, 33, 34, 35, 36, 37, 38, 39, 40, 41, 42, 43, 44, 45, 46, 47, 48, 49, 50, 51, 52, 53, 54, 55, 56, 57, 58, 59, 60, 61, 62, 63, 64, 65, 66, 67, 68, 69, 70, 71, 72, 73, 74, 75, 76, 77, 78, 79, 80, 81, 82, 83, 84, 85, 86, 87, 88, 89, 90, 91, 92, 93, 94, 95, 96, 97, 98, 99, 100, 101, 102, 103, 104, 105, 106, 107, 108, 109, 110, 111, 112, 113, 114, 115, 116, 117, 118, 119, 120, 121, 122, 123, 124, 125, 126, 127, 128, 129, 130, 131, 132, 133, 134, 135, 136, 137, 138, 139, 140, 141, 142, 143, 144, 145, 146, 147, 148, 149, 150, 151, 152, 153, 154, 155, 156, 157, 158, 159, 160, 161, 162, 163, 164, 165, 166, 167, 168, 169, 170, 171, 172, 173, 174, 175, 176, 177, 178, 179, 180, 181, 182, 183, 184, 185, 186, 187, 188, 189, 190, 191, 192, 193, 194, 195, 196, 197, 198, 199, 200, 210, 211, 212, 213, 214, 215, 216, 217, 218, 219, 220, 221, 222, 223, 224, 225, 226, 227, 228, 229, 230, 231, 232, 233, 234, 235, 236, 237, 238, 239, 240, 241, 242, 243, 244, 245, 246, 247, 248, 249, or 250 mg/mL in the diluent. In some embodiments, the ASO as described herein is present in the pharmaceutical composition at a concentration of at most 0.1, 0.2, 0.3, 0.4, 0.5, 0.6, 0.7, 0.8, 0.9, 1.0, 1.1, 1.2, 1.3, 1.4, 1.5, 1.6, 1.7, 1.8, 1.9, 2.0, 2.1, 2.2, 2.3, 2.4, 2.5, 2.6, 2.7, 2.8, 2.9, 3.0, 3.1, 3.2, 3.3, 3.4, 3.5, 3.6, 3.7, 3.8, 3.9, 4.0, 4.1, 4.2, 4.3, 4.4, 4.5, 4.6, 4.7, 4.8, 4.9, 5, 6, 7, 8, 9, 10, 11, 12, 13, 14, 15, 16, 17, 18, 19, 20, 21, 22, 23, 24, 25, 26, 27, 28, 29, 30, 31, 32, 33, 34, 35, 36, 37, 38, 39, 40, 41, 42, 43, 44, 45, 46, 47, 48, 49, 50, 51, 52, 53, 54, 55, 56, 57, 58, 59, 60, 61, 62, 63, 64, 65, 66, 67, 68, 69, 70, 71, 72, 73, 74, 75, 76, 77, 78, 79, 80, 81, 82, 83, 84, 85, 86, 87, 88, 89, 90, 91, 92, 93, 94, 95, 96, 97, 98, 99, 100, 101, 102, 103, 104, 105, 106, 107, 108, 109, 110, 111, 112, 113, 114, 115, 116, 117, 118, 119, 120, 121, 122, 123, 124, 125, 126, 127, 128, 129, 130, 131, 132, 133, 134, 135, 136, 137, 138, 139, 140, 141, 142, 143, 144, 145, 146, 147, 148, 149, 150, 151, 152, 153, 154, 155, 156, 157, 158, 159, 160, 161, 162, 163, 164, 165, 166, 167, 168, 169, 170, 171, 172, 173, 174, 175, 176, 177, 178, 179, 180, 181, 182, 183, 184, 185, 186, 187, 188, 189, 190, 191, 192, 193, 194, 195, 196, 197, 198, 199, 200, 210, 211, 212, 213, 214, 215, 216, 217, 218, 219, 220, 221, 222, 223, 224, 225, 226, 227, 228, 229, 230, 231, 232, 233, 234, 235, 236, 237, 238, 239, 240, 241, 242, 243, 244, 245, 246, 247, 248, 249, or 250 mg/mL in the diluent. In some embodiments, the ASO as described herein is present in the pharmaceutical composition at a concentration of 0.1, 0.2, 0.3, 0.4, 0.5, 0.6, 0.7, 0.8, 0.9, 1.0, 1.1, 1.2, 1.3, 1.4, 1.5, 1.6, 1.7, 1.8, 1.9, 2.0, 2.1, 2.2, 2.3, 2.4, 2.5, 2.6, 2.7, 2.8, 2.9, 3.0, 3.1, 3.2, 3.3, 3.4, 3.5, 3.6, 3.7, 3.8, 3.9, 4.0, 4.1, 4.2, 4.3, 4.4, 4.5, 4.6, 4.7, 4.8, 4.9, 5, 6, 7, 8, 9, 10, 11, 12, 13, 14, 15, 16, 17, 18, 19, 20, 21, 22, 23, 24, 25, 26, 27, 28, 29, 30, 31, 32, 33, 34, 35, 36, 37, 38, 39, 40, 41, 42, 43, 44, 45, 46, 47, 48, 49, 50, 51, 52, 53, 54, 55, 56, 57, 58, 59, 60, 61, 62, 63, 64, 65, 66, 67, 68, 69, 70, 71, 72, 73, 74, 75, 76, 77, 78, 79, 80, 81, 82, 83, 84, 85, 86, 87, 88, 89, 90, 91, 92, 93, 94, 95, 96, 97, 98, 99, 100, 101, 102, 103, 104, 105, 106, 107, 108, 109, 110, 111, 112, 113, 114, 115, 116, 117, 118, 119, 120, 121, 122, 123, 124, 125, 126, 127, 128, 129, 130, 131, 132, 133, 134, 135, 136, 137, 138, 139, 140, 141, 142, 143, 144, 145, 146, 147, 148, 149, 150, 151, 152, 153, 154, 155, 156, 157, 158, 159, 160, 161, 162, 163, 164, 165, 166, 167, 168, 169, 170, 171, 172, 173, 174, 175, 176, 177, 178, 179, 180, 181, 182, 183, 184, 185, 186, 187, 188, 189, 190, 191, 192, 193, 194, 195, 196, 197, 198, 199, 200, 210, 211, 212, 213, 214, 215, 216, 217, 218, 219, 220, 221, 222, 223, 224, 225, 226, 227, 228, 229, 230, 231, 232, 233, 234, 235, 236, 237, 238, 239, 240, 241, 242, 243, 244, 245, 246, 247, 248, 249, or 250 mg/mL in the diluent.

[0453] Pharmaceutical compositions comprising the agent, e.g., antisense oligonucleotide or antisense oligomer, of the described compositions and for use in any of the described methods can be prepared according to conventional techniques well known in the pharmaceutical industry and described in the published literature. In some embodiments, a pharmaceutical composition for treating a subject comprises an effective amount of any antisense oligomer as described herein, or a pharmaceutically acceptable salt, solvate, hydrate or ester thereof. In some embodiments, the pharmaceutical composition described herein further comprises a pharmaceutically acceptable excipient, carrier or diluent.

[0454] Pharmaceutical compositions can be formulated in a conventional manner using one or more pharmaceutically acceptable inactive ingredients that facilitate processing of the active compounds into preparations that can be used pharmaceutically. A proper formulation is dependent upon the route of administration chosen and a summary of pharmaceutical compositions can be found, for example, in Remington: The Science and Practice of Pharmacy, Nineteenth Ed (Easton, Pa.: Mack Publishing Company, 1995); Hoover, John E., Remington's Pharmaceutical Sciences, Mack Publishing Co., Easton, Pa. 1975; Liberman, H. A. and Lachman, L., Eds., Pharmaceutical Dosage Forms, Marcel Decker, New York, N.Y., 1980; and Pharmaceutical Dosage Forms and Drug Delivery Systems, Seventh Ed. (Lippincott Williams & Wilkins 1999), herein incorporated by reference. In some embodiments, the pharmaceutical composition facilitates administration of the compound to an organism.

Such compositions may comprise buffers such as neutral buffered saline, phosphate buffered saline and the like; carbohydrates such as glucose, mannose, sucrose or dextrans, mannitol; proteins; polypeptides or amino acids such as glycine; antioxidants; chelating agents such as EDTA or glutathione; adjuvants (e.g., aluminum hydroxide); and preservatives.

[0455] The terms “pharmaceutical composition” and “pharmaceutical formulation” (or “formulation”) are used interchangeably and denote a mixture or solution comprising a therapeutically effective amount of an active pharmaceutical ingredient together with one or more pharmaceutically acceptable excipients to be administered to a subject, e.g., a human in need thereof.

[0456] The term “pharmaceutically acceptable” denotes an attribute of a material which is useful in preparing a pharmaceutical composition that is generally safe, non-toxic, and neither biologically nor otherwise undesirable and is acceptable for veterinary as well as human pharmaceutical use. “Pharmaceutically acceptable” can refer a material, such as a carrier or diluent, which does not abrogate the biological activity or properties of the compound, and is relatively nontoxic, i.e., the material may be administered to an individual without causing undesirable biological effects or interacting in a deleterious manner with any of the components of the composition in which it is contained.

[0457] The terms “pharmaceutically acceptable excipient”, “pharmaceutically acceptable carrier” and “therapeutically inert excipient” can be used interchangeably and denote any pharmaceutically acceptable ingredient in a pharmaceutical composition having no therapeutic activity and being non-toxic to the subject administered, such as disintegrators, binders, fillers, solvents, buffers, tonicity agents, stabilizers, antioxidants, surfactants, carriers, diluents, excipients, preservatives or lubricants used in formulating pharmaceutical products.

[0458] In some embodiments, the compositions are prepared with carriers that will protect the components of the composition against rapid elimination from the body, such as a controlled release formulation, including implants and microencapsulated delivery systems. Biodegradable, biocompatible polymers can be used, such as ethylene vinyl acetate, polyanhydrides, polyglycolic acid, collagen, polyorthoesters, and polylactic acid. Methods for preparation of such formulations will be apparent to those skilled in the art. The materials can also be obtained commercially from Alza Corporation and Nova Pharmaceuticals, Inc. Liposomal suspensions (including liposomes targeted to infected cells with monoclonal antibodies to viral anti-gens) can also be used as pharmaceutically acceptable carriers. These can be prepared according to methods known to those skilled in the art, for example, as described in U.S. Pat. No. 4,522,811, of which entire content is incorporated herein by reference.

[0459] Pharmaceutical compositions or formulations comprising the agent, e.g., antisense oligonucleotide, of the described compositions and for use in any of the described methods can be prepared according to conventional techniques well known in the pharmaceutical industry and described in the published literature. In embodiments, a pharmaceutical composition or formulation for treating a subject comprises an effective amount of any antisense oligomer as described herein, or a pharmaceutically acceptable salt, solvate, hydrate or ester thereof. The pharmaceutical formulation comprising an antisense oligomer may further comprise a pharmaceutically acceptable excipient, diluent or carrier.

[0460] Pharmaceutically acceptable salts are suitable for use in contact with the tissues of humans and lower animals without undue toxicity, irritation, allergic response, etc., and are commensurate with a reasonable benefit/risk ratio. (See, e.g., S. M. Berge, et al., J. Pharmaceutical Sciences, 66: 1-19 (1977), incorporated herein by reference for this purpose. The salts can be prepared in situ during the final isolation and purification of the compounds, or separately by reacting the free base function with a suitable organic acid. Examples of pharmaceutically acceptable, nontoxic acid addition salts are salts of an amino group formed with inorganic acids such as hydrochloric acid, hydrobromic acid, phosphoric acid, sulfuric acid and perchloric acid or with organic acids such as acetic acid, oxalic acid, maleic acid, tartaric acid, citric acid, succinic acid or malonic acid or by using other documented methodologies such as ion exchange. Other pharmaceutically acceptable salts include adipate, alginate, ascorbate, aspartate, benzenesulfonate, benzoate, bisulfate, borate, butyrate, camphorate, camphorsulfonate, citrate, cyclopentanepropionate, digluconate, dodecylsulfate, ethanesulfonate, formate, fumarate, glucoheptonate, glycerophosphate, gluconate, hemisulfate, heptanoate, hexanoate, hydroiodide, 2-hydroxy-ethanesulfonate, lactobionate, lactate, laurate, lauryl sulfate, malate, maleate, malonate, methanesulfonate, 2-naphthalenesulfonate, nicotinate, nitrate, oleate, oxalate, palmitate, pamoate, pectinate, persulfate, 3-phenylpropionate, phosphate, picrate, pivalate, propionate, stearate, succinate, sulfate, tartrate, thiocyanate, p-toluenesulfonate, undecanoate, valerate salts, and the like. Representative alkali or alkaline earth metal salts include sodium, lithium, potassium, calcium, magnesium, and the like. Further pharmaceutically acceptable salts include, when appropriate, nontoxic ammonium, quaternary ammonium, and amine cations formed using counterions such as halide, hydroxide, carboxylate, sulfate, phosphate, nitrate, lower alkyl sulfonate and aryl sulfonate.

[0461] In some embodiments, provided herein is a method of producing the pharmaceutical composition as described herein.

### Pharmaceutical Formulation

[0462] In some aspects, provided herein is a pharmaceutical formulation comprising: an antisense oligomer (ASO as described herein), wherein the ASO as described herein comprises a sequence with at least 80% sequence identity to any one of SEQ ID NOs: 21-67, 210-256 or 304-1099; and a pharmaceutically acceptable diluent; wherein about 0.1, 0.5, 1, 2.5, 5, 6, 7, 8, 9, 10, 11, 12, 13, 14, 15, 16, 17, 18, 19, 20, 22.5, 25, 27.5, 30, 32.5, 35, 37.5, 40, 42.5, 45, 47.5, 50, 52.5, 55, 57.5, 60, 62.5, 65, 67.5, 70, 72.5, 75, 77.5, 80, 82.5, 85, 87.5, 90, 92.5, 95, 97.5, 100, 102.5, 105, 107.5, 110, 112.5, 115, 117.5, 120, 122.5, 125, 127.5, 130, 132.5, 135, 137.5, 140, 142.5, 145, 147.5, 150, 152.5, 155, 157.5, 160, 162.5, 165, 167.5, 170, 172.5, 175, 177.5, 180, 182.5, 185, 187.5, 190, 192.5, 195, 197.5, 200, 202.5, 205, 207.5, 210, 212.5, 215, 217.5, 220, 222.5, 225, 227.5, 230, 232.5, 235, 237.5, 240, 242.5, 245, 247.5, or 250 mg of the ASO as described herein is dissolved or suspended in a solution at a concentration of from 0.1-250 mg/mL. In some embodiments, the ASO as described herein comprises a sequence with at least 80% sequence identity to any one of the sequences listed in listed in Tables 4a, 4b, 5a, 5b, 6a, 6b, 7, 8a, and 8b.

[0463] In some embodiments, the ASO as described herein comprises a sequence with at least 60%, 65%, 66%, 67%, 68%, 69%, 70%, 71%, 72%, 73%, 74%, 75%, 76%, 77%, 78%, 79%, 80%, 81%, 82%, 83%, 884%, 85%, 86%, 87%, 88%, 89%, 90%, 91%, 92%, 93%, 94%, 95%, 96%, 97%, 98%, 99%, 99.5%, 99.8%, 99.9%, or 100% sequence identity to any one of SEQ ID NOs: 21-67, 210-256 or 304-1099. In some embodiments, the ASO as described herein consists of a sequence with at least 60%, 65%, 66%, 67%, 68%, 69%, 70%, 71%, 72%, 73%, 74%, 75%, 76%, 77%, 78%, 79%, 80%, 81%, 82%, 83%, 884%, 85%, 86%, 87%, 88%, 89%, 90%, 91%, 92%, 93%, 94%, 95%, 96%, 97%, 98%, 99%, 99.5%, 99.8%, 99.9%, or 100% sequence identity to any one of SEQ ID NOs: 21-67, 210-256 or 304-1099. In some embodiments, the ASO as described herein consists of a sequence with at least 60%, 65%, 66%, 67%, 68%, 69%, 70%, 71%, 72%, 73%, 74%, 75%, 76%, 77%, 78%, 79%, 80%, 81%, 82%, 83%, 884%, 85%, 86%, 87%, 88%, 89%, 90%, 91%, 92%, 93%, 94%, 95%, 96%, 97%, 98%, 99%, 99.5%, 99.8%, 99.9%, or 100% sequence identity to any one of the sequences listed in listed in Tables 4a, 4b, 5a, 5b, 6a, 6b, 7, 8a, and 8b.

[0464] In some embodiments, about 1-500, 2-500, 3-500, 4-500, 5-500, 6-500, 7-500, 8-500, 9-500, 10-500, 15-500, 20-500, 25-500, 30-500, 35-500, 40-500, 45-500, 50-500, 55-500, 60-500, 65-500, 70-500, 75-500, 80-500, 85-500, 90-500, 95-500, 100-500, 105-500, 110-500, 115-500, 120-500, 125-500, 130-500, 135-500, 140-500, 145-500, 150-500, 155-500, 160-500, 165-500, 170-500, 175-500, 180-500, 185-500, 190-500, 195-500, 205-500, 210-500, 215-500, 220-500, 225-500, 230-500, 235-500, 240-500, 245-500, 250-500, 255-500, 260-500, 265-500, 270-500, 275-500, 280-500, 285-500, 290-500, 295-500, 300-500, 305-500, 310-500, 315-500, 320-500, 325-500, 330-500, 335-500, 340-500, 345-500, 350-500, 355-500, 360-500, 365-500, 370-500, 375-500, 380-500, 385-500, 390-500, 395-500, 400-500, 405-500, 410-500, 415-500, 420-500, 425-500, 430-500, 435-500, 440-500, 445-500, 450-500, 455-500, 460-500, 465-500, 470-500, 475-500, 480-500, 485-500, 490-500, or 495-500 mg of the ASO as described herein is dissolved or suspended in a solution at a concentration of from 5-200 mg/mL. In some embodiments, about 1-495, 1-490, 1-485, 1-480, 1-475, 1-470, 1-465, 1-460, 1-455, 1-450, 1-445, 1-440, 1-435, 1-430, 1-425, 1-420, 1-415, 1-410, 1-405, 1-400, 1-395, 1-390, 1-385, 1-380, 1-375, 1-370, 1-365, 1-360, 1-355, 1-350, 1-345, 1-340, 1-335, 1-330, 1-325, 1-320, 1-315, 1-310, 1-305, 1-300, 1-295, 1-290, 1-285, 1-280, 1-275, 1-270, 1-265, 1-260, 1-255, 1-250, 1-245, 1-240, 1-235, 1-230, 1-225, 1-220, 1-215, 1-210, 1-205, 1-200, 1-195, 1-190, 1-185, 1-180, 1-175, 1-170, 1-165, 1-160, 1-155, 1-150, 1-145, 1-140, 1-135, 1-130, 1-125, 1-120, 1-115, 1-110, 1-105, 1-100, 1-95, 1-90, 1-85, 1-80, 1-75, 1-70, 1-65, 1-60, 1-55, 1-0, 1-45, 1-40, 1-35, 1-30, 1-25, 1-20, 1-15, 1-10, 1-9, 1-8, 1-7, 1-6, 1-5, 1-4, 1-3, or 1-2 mg of the ASO as described herein is dissolved or suspended in a solution at a concentration of from 5-200 mg/mL.

[0465] In some embodiments, at least about 0.1, 0.5, 1, 2.5, 5, 6, 7, 8, 9, 10, 11, 12, 13, 14, 15, 16, 17, 18, 19, 20, 22.5, 25, 27.5, 30, 32.5, 35, 37.5, 40, 42.5, 45, 47.5, 50, 52.5, 55, 57.5, 60, 62.5, 65, 67.5, 70, 72.5, 75, 77.5, 80, 82.5, 85, 87.5, 90, 92.5, 95, 97.5, 100, 102.5, 105, 107.5, 110, 112.5, 115, 117.5, 120, 122.5, 125, 127.5, 130, 132.5, 135, 137.5, 140, 142.5, 145, 147.5, 150, 152.5, 155, 157.5, 160, 162.5, 165, 167.5, 170, 172.5, 175, 177.5, 180, 182.5, 185, 187.5, 190, 192.5, 195, 197.5, 200, 202.5, 205, 207.5, 210, 212.5, 215, 217.5, 220, 222.5, 225, 227.5, 230, 232.5, 235, 237.5, 240, 242.5, 245, 247.5, or 250 mg of the ASO as described herein is dissolved or suspended in a solution at a concentration of from 0.1-250 mg/mL. In some embodiments, at most about 0.1, 0.5, 1, 2.5, 5, 6, 7, 8, 9, 10, 11, 12, 13, 14, 15, 16, 17, 18, 19, 20, 22.5, 25, 27.5, 30, 32.5, 35, 37.5, 40, 42.5, 45, 47.5, 50, 52.5, 55, 57.5, 60, 62.5, 65, 67.5, 70, 72.5, 75, 77.5, 80, 82.5, 85, 87.5, 90, 92.5, 95, 97.5, 100, 102.5, 105, 107.5, 110, 112.5, 115, 117.5, 120, 122.5, 125, 127.5, 130, 132.5, 135, 137.5, 140, 142.5, 145, 147.5, 150, 152.5, 155, 157.5, 160, 162.5, 165, 167.5, 170, 172.5, 175, 177.5, 180, 182.5, 185, 187.5, 190, 192.5, 195, 197.5, 200, 202.5, 205, 207.5, 210, 212.5, 215, 217.5, 220, 222.5, 225, 227.5, 230, 232.5, 235, 237.5, 240, 242.5, 245, 247.5, or 250 mg of the ASO as described herein is dissolved or suspended in a solution at a concentration of from 0.1-250 mg/mL. In some embodiments, about 0.1, 0.5, 1, 2.5, 5, 6, 7, 8, 9, 10, 11, 12, 13, 14, 15, 16, 17, 18, 19, 20, 22.5, 25, 27.5, 30, 32.5, 35, 37.5, 40, 42.5, 45, 47.5, 50, 52.5, 55, 57.5, 60, 62.5, 65, 67.5, 70, 72.5, 75, 77.5, 80, 82.5, 85, 87.5, 90, 92.5, 95, 97.5, 100, 102.5, 105, 107.5, 110, 112.5, 115, 117.5, 120, 122.5, 125, 127.5, 130, 132.5, 135, 137.5, 140, 142.5, 145, 147.5, 150, 152.5, 155, 157.5, 160, 162.5, 165, 167.5, 170, 172.5, 175, 177.5, 180, 182.5, 185, 187.5, 190, 192.5, 195, 197.5, 200, 202.5, 205, 207.5, 210, 212.5, 215, 217.5, 220, 222.5, 225, 227.5, 230, 232.5, 235, 237.5, 240, 242.5, 245, 247.5, or 250 mg of the ASO as described herein is dissolved or suspended in a solution at a concentration of from 0.1-250 mg/mL.

[0466] In some embodiments, the ASO as described herein is dissolved or suspended in a solution at a concentration of from 5-250, 5-247.5, 5-245, 5-242.5, 5-240, 5-237.5, 5-235, 5-232.5, 5-230, 5-227.5, 5-225, 5-225.5, 5-220, 5-217.5, 5-215, 5-212.5, 5-210, 5-205.5, 5-205, 5-202.5, 5-200, 5-197.5, 5-195, 5-192.5, 5-190, 5-187.5, 5-185, 5-182.5, 5-180, 5-177.5, 5-175, 5-172.5, 5-170, 5-167.5, 5-165, 5-162.5, 5-160, 5-157.5, 5-155, 5-152.5, 5-150, 5-147.5, 5-145, 5-142.5, 5-140, 5-137.5, 5-135, 5-132.5, 5-130, 5-127.5, 5-125, 5-122.5, 5-120, 5-117.5, 5-115, 5-112.5, 5-110, 5-107.5, 5-105, 5-102.5, 5-100, 5-97.5, 5-95, 5-92.5, 5-90, 5-87.5, 5-85, 5-82.5, 5-80, 5-77.5, 5-75, 5-72.5, 5-70, 5-67.5, 5-65, 5-62.5, 5-60, 5-57.5, 5-55, 5-52.5, 5-50, 5-47.5, 5-45, 5-42.5, 5-40, 5-37.5, 5-35, 5-32.5, 5-30, 5-27.5, 5-25, 5-22.5, 5-20, 5-17.5, 5-15, 5-12.5, or 5-10 mg/mL. In some embodiments, the ASO as described herein is dissolved or suspended in a solution at a concentration of from 10-250, 15-250, 20-250, 25-250, 30-250, 35-250, 40-250, 45-250, 50-250, 55-250, 60-250, 65-250, 70-250, 75-250, 80-250, 85-250, 90-250, 95-250, 100-250, 105-250, 110-250, 115-250, 120-250, 125-250, 130-250, 135-250, 140-250, 145-250, 150-250, 155-250, 160-250, 165-250, 170-250, 175-250, 180-250, 185-250, 190-250, or 195-250, 200-250, 205-250, 210-250, 215-250, 220-250, 225-250, 230-250, 235-250, 240-250, or 245-250 mg/mL. In some embodiments, the ASO as described herein is dissolved or suspended in a solution at a concentration of from at least 1, 2, 3, 4, 5, 6, 7, 8, 9, 10, 11, 12, 13, 14, 15, 16, 17, 18, 19, 20, 21, 22, 23, 24, 25, 26, 27, 28, 29, 30, 31, 32, 33, 34, 35, 36, 37, 38, 39, 40, 41, 42, 43, 44, 45, 46, 47, 48, 49, 50, 51, 52, 53, 54, 55, 56, 57, 58, 59, 60, 61, 62, 63, 64, 65, 66, 67, 68, 69, 70, 71, 72, 73, 74, 75, 76, 77, 78, 79, 80, 81, 82, 83, 84, 85, 86, 87, 88, 89, 90, 91, 92, 93, 94, 95, 96, 97, 98, 99, 100, 101, 102, 103, 104, 105, 106, 107, 108, 109, 110, 111, 112, 113, 114, 115, 116, 117, 118, 119, 120, 121, 122, 123, 124, 125, 126, 127, 128, 129, 130, 131, 132, 133, 134, 135, 136, 137, 138, 139, 140, 141, 142, 143, 144, 145, 146, 147, 148, 149, 150, 151, 152, 153, 154, 155, 156, 157, 158, 159, 160, 161, 162, 163, 164, 165, 166, 167, 168, 169, 170, 171, 172, 173, 174, 175, 176, 177, 178, 179, 180, 181, 182, 183, 184, 185, 186, 187, 188, 189, 190, 191, 192, 193, 194, 195, 196, 197, 198, 199, 200, 210, 211, 212, 213, 214, 215, 216, 217, 218, 219, 220, 221, 222, 223, 224, 225, 226, 227, 228, 229, 230, 231, 232, 233, 234, 235, 236, 237, 238, 239, 240, 241, 242, 243, 244, 245, 246, 247, 248, 249, or 250 mg/mL. In some embodiments, the ASO as described herein is dissolved or suspended in a solution at a concentration of from at most 1, 2, 3, 4, 5, 6, 7, 8, 9, 10, 11, 12, 13, 14, 15, 16, 17, 18, 19, 20, 21, 22, 23, 24, 25, 26, 27, 28, 29, 30, 31, 32, 33, 34, 35, 36, 37, 38, 39, 40, 41, 42, 43, 44, 45, 46, 47, 48, 49, 50, 51, 52, 53, 54, 55, 56, 57, 58, 59, 60, 61, 62, 63, 64, 65, 66, 67, 68, 69, 70, 71, 72, 73, 74, 75, 76, 77, 78, 79, 80, 81, 82, 83, 84, 85, 86, 87, 88, 89, 90, 91, 92, 93, 94, 95, 96, 97, 98, 99, 100, 101, 102, 103, 104, 105, 106, 107, 108, 109, 110, 111, 112, 113, 114, 115, 116, 117, 118, 119, 120, 121, 122, 123, 124, 125, 126, 127, 128, 129, 130, 131, 132, 133, 134, 135, 136, 137, 138, 139, 140, 141, 142, 143, 144, 145, 146, 147, 148, 149, 150, 151, 152, 153, 154, 155, 156, 157, 158, 159, 160, 161, 162, 163, 164, 165, 166, 167, 168, 169, 170, 171, 172, 173, 174, 175, 176, 177, 178, 179, 180, 181, 182, 183, 184, 185, 186, 187, 188, 189, 190, 191, 192, 193, 194, 195, 196, 197, 198, 199, 200, 210, 211, 212, 213, 214, 215, 216, 217, 218, 219, 220, 221, 222, 223, 224, 225, 226, 227, 228, 229, 230, 231, 232, 233, 234, 235, 236, 237, 238, 239, 240, 241, 242, 243, 244, 245, 246, 247, 248, 249, or 250 mg/mL. In some embodiments, the ASO as described herein is dissolved or suspended in a solution at a concentration of from 1, 2, 3, 4, 5, 6, 7, 8, 9, 10, 11, 12, 13, 14, 15, 16, 17, 18, 19, 20, 21, 22, 23, 24, 25, 26, 27, 28, 29, 30, 31, 32, 33, 34, 35, 36, 37, 38, 39, 40, 41, 42, 43, 44, 45, 46, 47, 48, 49, 50, 51, 52, 53, 54, 55, 56, 57, 58, 59, 60, 61, 62, 63, 64, 65, 66, 67, 68, 69, 70, 71, 72, 73, 74, 75, 76, 77, 78, 79, 80, 81, 82, 83, 84, 85, 86, 87, 88, 89, 90, 91, 92, 93, 94, 95, 96, 97, 98, 99, 100, 101, 102, 103, 104, 105, 106, 107, 108, 109, 110, 111, 112, 113, 114, 115, 116, 117, 118, 119, 120, 121, 122, 123, 124, 125, 126, 127, 128, 129, 130, 131, 132, 133, 134, 135, 136, 137, 138, 139, 140, 141, 142, 143, 144, 145, 146, 147, 148, 149, 150, 151, 152, 153, 154, 155, 156, 157, 158, 159, 160, 161, 162, 163, 164, 165, 166, 167, 168, 169, 170, 171, 172, 173, 174, 175, 176, 177, 178, 179, 180, 181, 182, 183, 184, 185, 186, 187, 188, 189, 190, 191, 192, 193, 194, 195, 196, 197, 198, 199, 200, 210, 211, 212, 213, 214, 215, 216, 217, 218, 219, 220, 221, 222, 223, 224, 225, 226, 227, 228, 229, 230, 231, 232, 233, 234, 235, 236, 237, 238, 239, 240, 241, 242, 243, 244, 245, 246, 247, 248, 249, or 250 mg/mL.

[0467] In some embodiments, the pharmaceutically acceptable diluent comprises an artificial cerebral spinal fluid (aCSF) solution. In some embodiments, the solution comprises a cerebral spinal fluid (CSF) sample from the subject. In some embodiments, the ASO as described herein is solubilized or diluted in an iso-tonic solution.

[0468] In some embodiments, the ASO as described herein is solubilized or diluted in a phosphate-buffered (pH 6.6-7.6) solution. In some embodiments, the ASO as described herein is solubilized or diluted in a phosphate-buffered (pH 6.0-8.0) solution. In some embodiments, the ASO as described herein is solubilized or diluted in a phosphate-buffered (pH 5.0-8.0) solution. In some embodiments, the ASO as described herein is solubilized or diluted in a phosphate-buffered solution with pH 4.5-8.5, pH 4.6-8.5, pH 4.7-8.5, pH 4.8-8.5, pH 4.9-8.5, pH5.0-8.5, pH 5.1-8.5, pH5.2-8.5, pH 5.3-8.5, pH5.4-8.5, pH 5.5-8.5, pH5.6-8.5, pH 5.7-8.5, pH 5.8-8.5, H 5.9-8.5, pH 6.0-8.5, pH 6.1-8.5, pH 6.2-8.5, pH 6.3-8.5, pH 6.4-8.5, pH 6.5-8.5, pH 6.6-8.5, pH 6.7-8.5, pH 6.8-8.5, pH 6.9-8.5, pH 7.0-8.5, pH 7.1-8.5, pH 7.2-8.5, pH 7.3-8.5, pH 7.4-8.5, pH 7.5-8.5, pH 7.6-8.5, pH 7.7-8.5, pH 7.8-8.5, pH 7.9-8.5, pH 8.0-8.5, pH 8.1-8.5, pH 8.2-8.5, pH 8.3-8.5, or pH 8.4-8.5. In some embodiments, the ASO as described herein is solubilized or diluted in a phosphate-buffered solution with pH 4.5-8.3, pH 4.5-8.2, pH 4.5-8.1, pH 4.5-8.0, pH 4.5-7.9, pH 4.5-7.8, pH 4.5-7.7, pH 4.5-7.6, pH 4.5-7.5, pH 4.5-7.4, pH 4.5-7.3, pH 4.5-7.2, pH 4.5-7.1, pH 4.5-7.0, pH 4.5-6.9, pH 4.5-6.8, pH 4.5-6.7, pH 4.5-6.6, pH 4.5-6.5, pH 4.5-6.4, pH 4.5-6.3, pH 4.5-6.2, pH 4.5-6.1, pH 4.5-6.0, pH 4.5-5.9, pH 4.5-5.8, pH 4.5-5.7, pH 4.5-5.6, pH 4.5-5.5, pH 4.5-5.4, pH 4.5-5.3, pH 4.5-5.2, pH 4.5-5.1, pH 4.5-5.0, pH 4.5-4.9, pH 4.5-4.8, pH 4.5-4.7, or pH 4.5-4.6. In some embodiments, the ASO as described herein is solubilized or diluted in a phosphate-buffered solution with pH 6.0-7.6, pH 6.1-7.6, pH 6.2-7.6, pH 6.3-7.6, pH 6.4-7.6, pH 6.5-7.6, pH 6.6-7.6, pH 6.7-7.6, pH 6.8-7.6, pH 6.9-7.6, pH 7.0-7.6, pH 7.1-7.6, pH 7.2-7.6, pH 7.3-7.6, pH 7.4-7.6, or pH 7.5-7.6. In some embodiments, the ASO as described herein is solubilized or diluted in a phosphate-buffered solution with pH 6.6-8.0, pH 6.6-7.9, pH 6.6-7.8, pH 6.6-7.7, pH 6.6-7.6, pH 6.6-7.5, pH 6.6-7.4, pH 6.6-7.3, pH 6.6-7.2, pH 6.6-7.1, pH 6.6-7.0, pH 6.6-6.9, pH 6.6-6.8, or pH 6.6-6.7. In some embodiments, the ASO as described herein is solubilized or diluted in a phosphate-buffered solution with pH 6.0-8.0, pH 6.1-8.0, pH 6.2-8.0, pH 6.3-8.0, pH 6.4-8.0, pH 6.5-8.0, pH 6.6-8.0, pH 6.7-8.0, pH 6.8-8.0, pH 6.9-8.0, pH 7.0-8.0, pH 7.1-8.0, pH 7.2-8.0, pH 7.3-8.0, pH 7.4-8.0, pH 7.5-8.0, pH 7.6-8.0, pH 7.7-8.0, pH 7.8-8.0, or pH 7.9-8.0. In some embodiments, the ASO as described herein is solubilized or diluted in a phosphate-buffered solution with pH 6.0-7.9, pH 6.0-7.8, pH 6.0-7.7, pH 6.0-7.6, pH 6.0-7.5, pH 6.0-7.4, pH 6.0-7.3, pH 6.0-7.2, pH 6.0-7.1, pH 6.0-7.0, pH 6.0-6.9, pH 6.0-6.8, pH 6.0-6.7, pH 6.0-6.6, pH 6.0-6.5, pH 6.0-6.4, pH 6.0-6.3, pH 6.0-6.2, or pH 6.0-6.1. In some embodiments, the ASO as described herein is solubilized or diluted in a phosphate-buffered solution with pH 5.7-8.5, 5.8-8.4, 5.9-8.3, 6.0-8.2, 6.1-8.1, 6.2-8.0, 6.3-7.9, 6.4-7.8, 6.5-7.7, or 6.6-7.6. In some embodiments, the ASO as described herein is solubilized or diluted in a phosphate-buffered solution with pH about 5.0, 5.1, 5.2, 5.3, 5.4, 5.5, 5.6, 5.7, 5.8, 5.9, 6.0. 6.1, 6.2, 6.3, 6.4, 6.5, 6.6, 6.7, 6.8, 6.9, 7.0, 7.1, 7.2, 7.3, 7.4, 7.5, 7.6, 7.7, 7.8, 7.9, or 8.0. In some embodiments, the ASO as described herein is solubilized or diluted in a phosphate-buffered solution with pH 5.0, 5.1, 5.2, 5.3, 5.4, 5.5, 5.6, 5.7, 5.8, 5.9, 6.0. 6.1, 6.2, 6.3, 6.4, 6.5, 6.6, 6.7, 6.8, 6.9, 7.0, 7.1, 7.2, 7.3, 7.4, 7.5, 7.6, 7.7, 7.8, 7.9, or 8.0.

[0469] In some embodiments, the ASO as described herein is solubilized or diluted in a buffer comprising 25-250 mM NaCl.

[0470] In some embodiments, the ASO as described herein is solubilized or diluted in a buffer comprising 25-250, 30-250, 35-250, 40-250, 45-250, 50-250, 55-250, 60-250, 65-250, 70-250, 75-250, 80-250, 85-250, 90-250, 95-250, 100-250, 105-250, 110-250, 115-250, 120-250, 125-250, 130-250, 135-250, 140-250, 145-250, 150-250, 155-250, 160-250, 165-250, 170-250, 175-250, 180-250, 185-250, 190-250, 195-250, 200-250, 205-250, 210-250, 215-250, 220-250, 225-250, 230-250, 235-250, 240-250, or 245-250 mM NaCl. In some embodiments, the ASO as described herein is solubilized or diluted in a buffer comprising 25-245, 25-240, 25-235, 25-230, 25-225, 25-220, 25-215, 25-210, 25-205, 25-200, 25-195, 25-190, 25-185, 25-180, 25-175, 25-170, 25-165, 25-160, 25-155, 25-150, 25-145, 25-140, 25-135, 25-130, 25-125, 25-120, 25-115, 25-110, 25-105, 25-110, 25-105, 25-100, 25-95, 25-90, 25-85, 25-80, 25-75, 25-70, 25-65, 25-60, 25-55, 25-50, 25-45, 25-40, 25-35, or 25-30 mM NaCl. In some embodiments, the ASO as described herein is solubilized or diluted in a buffer comprising 30-245, 35-240, 40-235, 45-230, 50-225, 55-220, 60-215, 65-210, 70-205, 75-200, 80-195, 85-190, 90-185, 95-180, 100-175, 105-170, 110-165, 115-160, 120-155, 125-150, 130-145 or 135-140 mM NaCl. In some embodiments, the ASO as described herein is solubilized or diluted in a buffer comprising 100-140, 101-140, 102-140, 103-140, 104-140, 105-140, 106-140, 107-140, 108-140, 109-140, 110-140, 111-140, 112-140, 113-140, 114-140, 115-140, 116-140, 117-140, 118-140, 119-140, 120-140, 121-140, 122-140, 123-140, 124-140, 125-140, 126-140, 127-140, 128-140, 129-140, 130-140, 131-140, 132-140, 133-140, 134-140, 135-140, 136-140, 137-140, 138-140, or 139-140 mM NaCl. In some embodiments, the ASO as described herein is solubilized or diluted in a buffer comprising 100-139, 100-138, 100-137, 100-136, 100-135, 100-134, 100-133, 100-132, 100-131, 100-130, 100-129, 100-128, 100-127, 100-126, 100-125, 100-124, 100-123, 100-122, 100-121, 100-120, 100-119, 100-118, 100-117, 100-116, 100-115, 100-114, 100-113, 100-112, 100-111, 100-110, 100-109, 100-108, 100-107, 100-106, 100-105, 100-104, 100-103, 100-102, or 100-101 mM NaCl. In some embodiments, the ASO as described herein is solubilized or diluted in a buffer comprising at least 90, 91, 92, 93, 94, 95, 96, 97, 98, 99, 100, 101, 102, 103, 104, 105, 106, 107, 108, 109, 110, 111, 112, 113, 114, 115, 116, 118, 119, 120, 121, 122, 123, 124, 125, 126, 127, 128, 129, 130, 131, 132, 133, 134, 135, 136, 137, 138, 139, or 140 mM NaCl. In some embodiments, the ASO as described herein is solubilized or diluted in a buffer comprising at most 90, 91, 92, 93, 94, 95, 96, 97, 98, 99, 100, 101, 102, 103, 104, 105, 106, 107, 108, 109, 110, 111, 112, 113, 114, 115, 116, 118, 119, 120, 121, 122, 123, 124, 125, 126, 127, 128, 129, 130, 131, 132, 133, 134, 135, 136, 137, 138, 139, or 140 mM NaCl. In some embodiments, the ASO as described herein is solubilized or diluted in a buffer comprising 90, 91, 92, 93, 94, 95, 96, 97, 98, 99, 100, 101, 102, 103, 104, 105, 106, 107, 108, 109, 110, 111, 112, 113, 114, 115, 116, 118, 119, 120, 121, 122, 123, 124, 125, 126, 127, 128, 129, 130, 131, 132, 133, 134, 135, 136, 137, 138, 139, or 140 mM NaCl.

[0471] In some embodiments, the ASO as described herein is solubilized or diluted in a buffer comprising 0.1-20 mM KCl.

[0472] In some embodiments, the ASO as described herein is solubilized or diluted in a buffer comprising 0.1-40, 0.1-39, 0.1-38, 0.1-37, 0.1-36, 0.1-35, 0.1-34, 0.1-33, 0.1-32, 0.1-31, 0.1-30, 0.1-29, 0.1-28, 0.1-27, 0.1-26, 0.1-25, 0.1-24, 0.1-23, 0.1-22, 0.1-21, 0.1-20, 0.1-19, 0.1-18, 0.1-17, 0.1-16, 0.1-15, 0.1-14, 0.1-13, 0.1-12, 0.1-10, 0.1-9, 0.1-8, 0.1-7, 0.1-6, 0.1-5, 0.1-4, 0.1-3, 0.1-2, or 0.1-1 mM KCl. In some embodiments, the ASO as described herein is solubilized or diluted in a buffer comprising 0.2-40, 0.3-40, 0.4-40, 0.5-40, 0.6-40, 0.7-40, 0.8-40, 0.9-40, 1-40, 2-40, 3-40, 4-40, 5-40, 6-40, 7-40, 8-40, 9-40, 10-40, 11-40, 12-40, 13-40, 14-40, 15-40, 16-40, 17-40, 18-40, 19-40, 20-40, 21-40, 22-40, 23-40, 24-40, 25-40, 26-40, 27-40, 28-40, 29-40, 30-40, 31-40, 32-40, 33-40, 34-40, 35-40, 36-40, 37-40, 38-40, or 39-40 mM KCl. In some embodiments, the ASO as described herein is solubilized or diluted in a buffer comprising 0.1-3.5, 0.2-3.5, 0.3-3.5, 0.4-3.5, 0.5-3.5, 0.6-3.5, 0.7-3.5, 0.8-3.5, 0.9-3.5, 1.0-3.5, 1.1-3.5, 1.2-3.5, 1.3-3.5, 1.4-3.5, 1.5-3.5, 1.6-3.5, 1.7-3.5, 1.8-3.5, 1.9-3.5, 2.0-3.5, 2.1-3.5, 2.2-3.5, 2.3-3.5, 2.4-3.5, 2.5-3.5, 2.6-3.5, 2.7-3.5, 2.8-3.5, 2.9-3.5, 3.0-3.5, 3.1-3.5, 3.2-3.5, 3.3-3.5, or 3.4-3.5 mM KCl. In some embodiments, the ASO as described herein is solubilized or diluted in a buffer comprising 0.1-3.4, 0.1-3.3, 0.1-3.2, 0.1-3.1, 0.1-3.0, 0.1-2.9, 0.1-2.8, 0.1-2.7, 0.1-2.6, 0.1-2.5, 0.1-2.4, 0.1-2.3, 0.1-2.2, 0.1-2.1, 0.1-2.0, 0.1-1.9, 0.1-1.8, 0.1-1.7, 0.1-1.6, 0.1-1.5, 0.1-1.4, 0.1-1.3, 0.1-1.2, 0.1-1.1, 0.1-1.0, 0.1-0.9, 0.1-0.8, 0.1-0.7, 0.1-0.6, 0.1-0.5, 0.1-0.4, 0.1-0.3, or 0.1-0.2 mM KCl. In some embodiments, the ASO as described herein is solubilized or diluted in a buffer comprising at least 0.1, 0.2, 0.3, 0.4, 0.5, 0.6, 0.7, 0.8, 0.9, 1.0, 1.1, 1.2, 1.3, 1.4, 1.5, 1.6, 1.7, 1.8, 1.9, 2.0, 2.1, 2.2, 2.3, 2.4, 2.5, 2.6, 2.7, 2.8, 2.9, 3.0, 3.1, 3.2, 3.3, 3.4, or 3.5 mM KCl. In some embodiments, the ASO as described herein is solubilized or diluted in a buffer comprising at most 0.1, 0.2, 0.3, 0.4, 0.5, 0.6, 0.7, 0.8, 0.9, 1.0, 1.1, 1.2, 1.3, 1.4, 1.5, 1.6, 1.7, 1.8, 1.9, 2.0, 2.1, 2.2, 2.3, 2.4, 2.5, 2.6, 2.7, 2.8, 2.9, 3.0, 3.1, 3.2, 3.3, 3.4, or 3.5 mM KCl. In some embodiments, the ASO as described herein is solubilized or diluted in a buffer comprising 0.1, 0.2, 0.3, 0.4, 0.5, 0.6, 0.7, 0.8, 0.9, 1.0, 1.1, 1.2, 1.3, 1.4, 1.5, 1.6, 1.7, 1.8, 1.9, 2.0, 2.1, 2.2, 2.3, 2.4, 2.5, 2.6, 2.7, 2.8, 2.9, 3.0, 3.1, 3.2, 3.3, 3.4, or 3.5 mM KCl.

[0473] In some embodiments, the ASO as described herein is solubilized or diluted in a buffer comprising 0.1-50 mM Na₂HPO₄.

[0474] In some embodiments, the ASO as described herein is solubilized or diluted in a buffer comprising 0.01-100, 0.02-100, 0.03-100, 0.04-100, 0.05-100, 0.06-100, 0.07-100, 0.08-100, 0.09-100, 0.1-100, 0.2-100, 0.3-100, 0.4-100, 0.5-100, 0.6-100, 0.7-100, 0.8-100, 0.9-100, 1-100, 2-100, 3-100, 4-100, 5-100, 6-100, 7-100, 8-100, 9-100, 10-100, 15-100, 20-100, 25-100, 30-100, 35-100, 40-100, 45-100, 50-100, 55-100, 60-100, 65-100, 70-100, 75-100, 80-100, 85-100, 90-100, or 95-100 mM Na₂HPO₄. In some embodiments, the ASO as described herein is solubilized or diluted in a buffer comprising 0.01-95, 0.01-90, 0.01-85, 0.01-80, 0.01-75, 0.01-70, 0.01-65, 0.01-60, 0.01-55, 0.01-50, 0.01-45, 0.01-40, 0.01-35, 0.01-30, 0.01-25, 0.01-20, 0.01-15, 0.01-10, 0.01-9, 0.01-8, 0.01-7, 0.01-6, 0.01-5, 0.01-4, 0.01-3, 0.01-2, 0.01-1, 0.01-0.9, 0.01-0.8, 0.01-0.7, 0.01-0.6, 0.01-0.5, 0.01-0.4, 0.01-0.3, 0.01-0.2, 0.01-0.1, 0.01-0.09, 0.01-0.08, 0.01-0.07, 0.01-0.06, 0.01-0.05, 0.01-0.04, 0.01-0.03, or 0.01-0.02 mM Na₂HPO₄. In some embodiments, the ASO as described herein is solubilized or diluted in a buffer comprising 0.1-3.0, 0.1-2.9, 0.1-2.8, 0.1-2.7, 0.1-2.6, 0.1-2.5, 0.1-2.4, 0.1-2.3, 0.1-2.2, 0.1-2.1, 0.1-2.0, 0.1-1.9, 0.1-1.8, 0.1-1.7, 0.1-1.6, 0.1-1.5, 0.1-1.4, 0.1-1.3, 0.1-1.2, 0.1-1.1, 0.1-1.0, 0.1-0.9, 0.1-0.8, 0.1-0.7, 0.1-0.6, 0.1-0.5, 0.1-0.4, 0.1-0.3, or 0.1-0.2 mM Na₂HPO₄. In some embodiments, the ASO as described herein is solubilized or diluted in a buffer comprising 0.1-3.0, 0.2-3.0, 0.3-3.0, 0.4-3.0, 0.5-3.0, 0.6-3.0, 0.7-3.0, 0.8-3.0, 0.9-3.0, 1.0-3.0, 1.2-3.0, 1.3-3.0, 1.4-3.0, 1.5-3.0, 1.6-3.0, 1.7-3.0, 1.8-3.0, 1.9-3.0, 2.0-3.0, 2.1-3.0, 2.2-3.0, 2.3-3.0, 2.4-3.0, 2.5-3.0, 2.6-3.0, 2.7-3.0, 2.8-3.0, or 2.9-3.0 mM Na₂HPO₄. In some embodiments, the ASO as described herein is solubilized or diluted in a buffer comprising at least 0.1, 0.2, 0.3, 0.4, 0.5, 0.6, 0.7, 0.8, 0.9, 1.0, 1.1, 1.2, 1.3, 1.4, 1.5, 1.6, 1.7, 1.8, 1.9, 2.0, 2.1, 2.2, 2.3, 2.4, 2.5, 2.6, 2.7, 2.8, 2.9, or 3.0 mM Na₂HPO₄. In some embodiments, the ASO as described herein is solubilized or diluted in a buffer comprising at most 0.1, 0.2, 0.3, 0.4, 0.5, 0.6, 0.7, 0.8, 0.9, 1.0, 1.1, 1.2, 1.3, 1.4, 1.5, 1.6, 1.7, 1.8, 1.9, 2.0, 2.1, 2.2, 2.3, 2.4, 2.5, 2.6, 2.7, 2.8, 2.9, or 3.0 mM Na₂HPO₄. In some embodiments, the ASO as described herein is solubilized or diluted in a buffer comprising 0.1, 0.2, 0.3, 0.4, 0.5, 0.6, 0.7, 0.8, 0.9, 1.0, 1.1, 1.2, 1.3, 1.4, 1.5, 1.6, 1.7, 1.8, 1.9, 2.0, 2.1, 2.2, 2.3, 2.4, 2.5, 2.6, 2.7, 2.8, 2.9, or 3.0 mM Na₂HPO₄.

[0475] In some embodiments, the ASO as described herein is solubilized or diluted in a buffer comprising 0.1-50 mM NaH₂PO₄.

[0476] In some embodiments, the ASO as described herein is solubilized or diluted in a buffer comprising 0.01-100, 0.02-100, 0.03-100, 0.04-100, 0.05-100, 0.06-100, 0.07-100, 0.08-100, 0.09-100, 0.1-100, 0.2-100, 0.3-100, 0.4-100, 0.5-100, 0.6-100, 0.7-100, 0.8-100, 0.9-100, 1-100, 2-100, 3-100, 4-100, 5-100, 6-100, 7-100, 8-100, 9-100, 10-100, 15-100, 20-100, 25-100, 30-100, 35-100, 40-100, 45-100, 50-100, 55-100, 60-100, 65-100, 70-100, 75-100, 80-100, 85-100, 90-100, or 95-100 mM NaH₂PO₄. In some embodiments, the ASO as described herein is solubilized or diluted in a buffer comprising 0.01-95, 0.01-90, 0.01-85, 0.01-80, 0.01-75, 0.01-70, 0.01-65, 0.01-60, 0.01-55, 0.01-50, 0.01-45, 0.01-40, 0.01-35, 0.01-30, 0.01-25, 0.01-20, 0.01-15, 0.01-10, 0.01-9, 0.01-8, 0.01-7, 0.01-6, 0.01-5, 0.01-4, 0.01-3, 0.01-2, 0.01-1, 0.01-0.9, 0.01-0.8, 0.01-0.7, 0.01-0.6, 0.01-0.5, 0.01-0.4, 0.01-0.3, 0.01-0.2, 0.01-0.1, 0.01-0.09, 0.01-0.08, 0.01-0.07, 0.01-0.06, 0.01-0.05, 0.01-0.04, 0.01-0.03, or 0.01-0.02 mM NaH₂PO₄. In some embodiments, the ASO as described herein is solubilized or diluted in a buffer comprising 0.1-3.0, 0.1-2.9, 0.1-2.8, 0.1-2.7, 0.1-2.6, 0.1-2.5, 0.1-2.4, 0.1-2.3, 0.1-2.2, 0.1-2.1, 0.1-2.0, 0.1-1.9, 0.1-1.8, 0.1-1.7, 0.1-1.6, 0.1-1.5, 0.1-1.4, 0.1-1.3, 0.1-1.2, 0.1-1.1, 0.1-1.0, 0.1-0.9, 0.1-0.8, 0.1-0.7, 0.1-0.6, 0.1-0.5, 0.1-0.4, 0.1-0.3, or 0.1-0.2 mM NaH₂PO₄. In some embodiments, the ASO as described herein is solubilized or diluted in a buffer comprising 0.1-3.0, 0.2-3.0, 0.3-3.0, 0.4-3.0, 0.5-3.0, 0.6-3.0, 0.7-3.0, 0.8-3.0, 0.9-3.0, 1.0-3.0, 1.2-3.0, 1.3-3.0, 1.4-3.0, 1.5-3.0, 1.6-3.0, 1.7-3.0, 1.8-3.0, 1.9-3.0, 2.0-3.0, 2.1-3.0, 2.2-3.0, 2.3-3.0, 2.4-3.0, 2.5-3.0, 2.6-3.0, 2.7-3.0, 2.8-3.0, or 2.9-3.0 mM NaH₂PO₄. In some embodiments, the ASO as described herein is solubilized or diluted in a buffer comprising at least 0.1, 0.2, 0.3, 0.4, 0.5, 0.6, 0.7, 0.8, 0.9, 1.0, 1.1, 1.2, 1.3, 1.4, 1.5, 1.6, 1.7, 1.8, 1.9, 2.0, 2.1, 2.2, 2.3, 2.4, 2.5, 2.6, 2.7, 2.8, 2.9, or 3.0 mM NaH₂PO₄. In some embodiments, the ASO as described herein is solubilized or diluted in a buffer comprising at most 0.1, 0.2, 0.3, 0.4, 0.5, 0.6, 0.7, 0.8, 0.9, 1.0, 1.1, 1.2, 1.3, 1.4, 1.5, 1.6, 1.7, 1.8, 1.9, 2.0, 2.1, 2.2, 2.3, 2.4, 2.5, 2.6, 2.7, 2.8, 2.9, or 3.0 mM NaH₂PO₄. In some embodiments, the ASO as described herein is solubilized or diluted in a buffer comprising 0.1, 0.2, 0.3, 0.4, 0.5, 0.6, 0.7, 0.8, 0.9, 1.0, 1.1, 1.2, 1.3, 1.4, 1.5, 1.6, 1.7, 1.8, 1.9, 2.0, 2.1, 2.2, 2.3, 2.4, 2.5, 2.6, 2.7, 2.8, 2.9, or 3.0 mM NaH₂PO₄.

[0477] In some embodiments, the ASO as described herein is solubilized or diluted in a buffer comprising 0.1-50 mM CaCl₂.

[0478] In some embodiments, the ASO as described herein is solubilized or diluted in a buffer comprising 0.1-50, 0.2-50, 0.3-50, 0.4-50, 0.5-50, 0.6-50, 0.7-50, 0.8-50, 0.9-50, 1.0-50, −50, 1.1-50, 1.2-50, 1.3-50, 1.4-50, 1.5-50, 1.6-50, 1.7-50, 1.8-50, 1.9-50, 2.0-50, 2.1-50, 2.2-50, 2.3-50, 2.4-50, 2.5-50, 2.6-50, 2.7-50, 2.8-50, 2.9-50, 3.0-50, 3.1-50, 3.2-50, 3.3-50, 3.4-50, 3.5-50, 3.6-50, 3.7-50, 3.8-50, 3.9-50, 4-50, 5-50, 6-50, 7-50, 8-50, 9-50, 10-50, 15-50, 20-50, 25-50, 1 30-50, 35-50, 40-50, or 45-50 mM CaCl₂. In some embodiments, the ASO as described herein is solubilized or diluted in a buffer comprising 0.1-45, 0.1-40, 0.1-35, 0.1-30, 0.1-25, 0.1-20, 0.1-15, 0.1-10, 0.1-5, 0.1-4, 0.1-4.9, 0.1-4.8, 0.1-4.7, 0.1-4.6, 0.1-4.5, 0.1-4.4, 0.1-4.3, 0.1-4.2, 0.1-4.1, 0.1-4.0, 0.1-3.9, 0.1-3.8, 0.1-3.7, 0.1-3.6, 0.1-3.5, 0.1-3.4, 0.1-3.3, 0.1-3.2, 0.1-3.1, 0.1-3.0, 0.1-2.9, 0.1-2.8, 0.1-2.7, 0.1-2.6, 0.1-2.5, 0.1-2.4, 0.1-2.3, 0.1-2.2, 0.1-2.1, 0.1-2.0, 0.1-1.9, 0.1-1.8, 0.1-1.7, 0.1-1.6, 0.1-1.5, 0.1-1.4, 0.1-1.3, 0.1-1.2, 0.1-1.1, 0.1-1.0, 0.1-0.9, 0.1-0.8, 0.1-0.7, 0.1-0.6, 0.1-0.5, 0.1-0.4, 0.1-0.3, or 0.1-0.2 mM CaCl₂. In some embodiments, the ASO as described herein is solubilized or diluted in a buffer comprising at least 1.0, 1.1, 1.2, 1.3, 1.4, 1.5, 1.6, 1.7, 1.8, 1.9, 2.0, 2.1, 2.2, 2.3, 2.4, 2.5, 2.6, 2.7, 2.8, 2.9, 3.0, 3.1, 3.2, 3.3, 3.4, 3.5, 3.6, 3.7, 3.8, 3.9, or 4.0 mM CaCl₂. In some embodiments, the ASO as described herein is solubilized or diluted in a buffer comprising at most 1.0, 1.1, 1.2, 1.3, 1.4, 1.5, 1.6, 1.7, 1.8, 1.9, 2.0, 2.1, 2.2, 2.3, 2.4, 2.5, 2.6, 2.7, 2.8, 2.9, 3.0, 3.1, 3.2, 3.3, 3.4, 3.5, 3.6, 3.7, 3.8, 3.9, or 4.0 mM CaCl₂. In some embodiments, the ASO as described herein is solubilized or diluted in a buffer comprising 1.0, 1.1, 1.2, 1.3, 1.4, 1.5, 1.6, 1.7, 1.8, 1.9, 2.0, 2.1, 2.2, 2.3, 2.4, 2.5, 2.6, 2.7, 2.8, 2.9, 3.0, 3.1, 3.2, 3.3, 3.4, 3.5, 3.6, 3.7, 3.8, 3.9, or 4.0 mM CaCl₂.

[0479] In some embodiments, the ASO as described herein is solubilized or diluted in a buffer comprising 0.1-50 mM MgCl₂.

[0480] In some embodiments, the ASO as described herein is solubilized or diluted in a buffer comprising 0.1-50, 0.2-50, 0.3-50, 0.4-50, 0.5-50, 0.6-50, 0.7-50, 0.8-50, 0.9-50, 1.0-50, −50, 1.1-50, 1.2-50, 1.3-50, 1.4-50, 1.5-50, 1.6-50, 1.7-50, 1.8-50, 1.9-50, 2.0-50, 2.1-50, 2.2-50, 2.3-50, 2.4-50, 2.5-50, 2.6-50, 2.7-50, 2.8-50, 2.9-50, 3.0-50, 3.1-50, 3.2-50, 3.3-50, 3.4-50, 3.5-50, 3.6-50, 3.7-50, 3.8-50, 3.9-50, 4-50, 5-50, 6-50, 7-50, 8-50, 9-50, 10-50, 15-50, 20-50, 25-50, 1 30-50, 35-50, 40-50, or 45-50 mM MgCl₂. In some embodiments, the ASO as described herein is solubilized or diluted in a buffer comprising 0.1-45, 0.1-40, 0.1-35, 0.1-30, 0.1-25, 0.1-20, 0.1-15, 0.1-10, 0.1-5, 0.1-4, 0.1-4.9, 0.1-4.8, 0.1-4.7, 0.1-4.6, 0.1-4.5, 0.1-4.4, 0.1-4.3, 0.1-4.2, 0.1-4.1, 0.1-4.0, 0.1-3.9, 0.1-3.8, 0.1-3.7, 0.1-3.6, 0.1-3.5, 0.1-3.4, 0.1-3.3, 0.1-3.2, 0.1-3.1, 0.1-3.0, 0.1-2.9, 0.1-2.8, 0.1-2.7, 0.1-2.6, 0.1-2.5, 0.1-2.4, 0.1-2.3, 0.1-2.2, 0.1-2.1, 0.1-2.0, 0.1-1.9, 0.1-1.8, 0.1-1.7, 0.1-1.6, 0.1-1.5, 0.1-1.4, 0.1-1.3, 0.1-1.2, 0.1-1.1, 0.1-1.0, 0.1-0.9, 0.1-0.8, 0.1-0.7, 0.1-0.6, 0.1-0.5, 0.1-0.4, 0.1-0.3, or 0.1-0.2 mM MgCl₂. In some embodiments, the ASO as described herein is solubilized or diluted in a buffer comprising at least 0.1, 0.2, 0.3, 0.4, 0.5, 0.6, 0.7, 0.8, 0.9, 1.0, 1.1, 1.2, 1.3, 1.4, 1.5, 1.6, 1.7, 1.8, 1.9, 2.0, 2.1, 2.2, 2.3, 2.4, 2.5, 2.6, 2.7, 2.8, 2.9, 3.0, 3.1, 3.2, 3.3, 3.4, 3.5, 3.6, 3.7, 3.8, 3.9, or 4.0 mM MgCl₂. In some embodiments, the ASO as described herein is solubilized or diluted in a buffer comprising at most 0.1, 0.2, 0.3, 0.4, 0.5, 0.6, 0.7, 0.8, 0.9, 1.0, 1.1, 1.2, 1.3, 1.4, 1.5, 1.6, 1.7, 1.8, 1.9, 2.0, 2.1, 2.2, 2.3, 2.4, 2.5, 2.6, 2.7, 2.8, 2.9, 3.0, 3.1, 3.2, 3.3, 3.4, 3.5, 3.6, 3.7, 3.8, 3.9, or 4.0 mM MgCl₂. In some embodiments, the ASO as described herein is solubilized or diluted in a buffer comprising 0.1, 0.2, 0.3, 0.4, 0.5, 0.6, 0.7, 0.8, 0.9, 1.0, 1.1, 1.2, 1.3, 1.4, 1.5, 1.6, 1.7, 1.8, 1.9, 2.0, 2.1, 2.2, 2.3, 2.4, 2.5, 2.6, 2.7, 2.8, 2.9, 3.0, 3.1, 3.2, 3.3, 3.4, 3.5, 3.6, 3.7, 3.8, 3.9, or 4.0 mM MgCl₂.

[0481] In some embodiments, the ASO is solubilized or diluted in a buffer further comprising 1-100 mM NaHCO₃, 1-100 mM KHCO₃, or a combination thereof.

[0482] In some embodiments, the ASO as described herein is solubilized or diluted in a buffer comprising 1-100 mM NaHCO₃.

[0483] In some embodiments, the ASO as described herein is solubilized or diluted in a buffer comprising 1-99, 1-95, 1-90, 1-85, 1-80, 1-75, 1-70, 1-65, 1-60, 1-55, 1-50, 1-45, 1-40, 1-35, 1-30, 1-25, 1-20, 1-15, 1-10, 1-9, 1-8, 1-7, 1-6, 1-5, 1-4, 1-3, or 1-2 mM NaHCO₃. In some embodiments, the ASO as described herein is solubilized or diluted in a buffer comprising 2-100, 3-100, 4-100, 5-100, 6-100, 7-100, 8-100, 9-100, 10-100, 15-100, 20-100, 25-100, 30-100, 35-100, 40-100, 45-100, 50-100, 55-100, 60-100, 65-100, 70-100, 75-100, 80-100, 85-100, 90-100, or 95-100 mM NaHCO₃. In some embodiments, the ASO as described herein is solubilized or diluted in a buffer comprising 24.0-28.0, 24.0-27.9, 24.0-27.8, 24.0-27.7, 24.0-27.6, 24.0-27.5, 24.0-27.4, 24.0-27.3, 24.0-27.2, 24.0-27.1, 24.0-27.0, 24.0-26.9, 24.0-26.8, 24.0-26.7, 24.0-26.6, 24.0-26.5, 24.0-26.4, 24.0-26.3, 24.0-26.2, 24.0-26.1, 24.0-26.0, 24.0-25.9, 4.0-25.8, 24.0-25.7, 24.0-25.6, 24.0-25.5, 24.0-25.4, 24.0-25.3, 24.0-25.2, 24.0-25.1, 24.0-25.0, 24.0-24.9, 24.0-24.8, 24.0-24.7, 24.0-24.6, 24.0-24.5, 24.0-24.4, 24.0-24.3, 24.0-24.2, or 24.0-24.1 mM NaHCO₃. In some embodiments, the ASO as described herein is solubilized or diluted in a buffer comprising 24.1-28.0, 24.2-28.0, 24.3-28.0, 24.4-28.0, 24.5-28.0, 24.6-28.0, 24.7-28.0, 24.8-28.0, 24.9-28.0, 25.0-28.0, 25.1-28.0, 25.2-28.0, 25.3-28.0, 25.4-28.0, 25.5-28.0, 25.6-28.0, 25.7-28.0, 25.8-28.0, 25.9-28.0, 26.0-28.0, 26.1-28.0, 26.2-28.0, 26.3-28.0, 26.4-28.0, 26.5-28.0, 26.6-28.0, 26.7-28.0, 26.8-28.0, 26.9-28.0, 27.0-28.0, 27.1-28.0, 27.2-28.0, 27.3-28.0, 27.4-28.0, 27.5-28.0, 27.6-28.0, 27.7-28.0, 27.8-28.0, or 27.9-28.0 mM NaHCO₃. In some embodiments, the ASO as described herein is solubilized or diluted in a buffer comprising at least 24.0, 24.1, 24.2, 24.3, 24.4, 24.5, 24.6, 24.7, 24.8, 24.9, 25.0, 25.1, 25.2, 25.3, 25.4, 25.5, 25.6, 25.7, 25.8, 25.9, 26.0, 26.1, 26.2, 26.3, 26.4, 26.5, 26.6, 26.7, 26.8, 26.9, 27.0, 27.1, 27.2, 27.3, 27.4, 27.5, 27.6, 27.7, 27.8, 27.9, or 28.0 mM NaHCO₃. In some embodiments, the ASO as described herein is solubilized or diluted in a buffer comprising at most 24.0, 24.1, 24.2, 24.3, 24.4, 24.5, 24.6, 24.7, 24.8, 24.9, 25.0, 25.1, 25.2, 25.3, 25.4, 25.5, 25.6, 25.7, 25.8, 25.9, 26.1, 26.2, 26.3, 26.4, 26.5, 26.6, 26.7, 26.8, 26.9, 27.0, 27.1, 27.2, 27.3, 27.4, 27.5, 27.6, 27.7, 27.8, 27.9, or 28.0 mM NaHCO₃. In some embodiments, the ASO as described herein is solubilized or diluted in a buffer comprising 24.0, 24.1, 24.2, 24.3, 24.4, 24.5, 24.6, 24.7, 24.8, 24.9, 25.0, 25.1, 25.2, 25.3, 25.4, 25.5, 25.6, 25.7, 25.8, 25.9, 26.1, 26.2, 26.3, 26.4, 26.5, 26.6, 26.7, 26.8, 26.9, 27.0, 27.1, 27.2, 27.3, 27.4, 27.5, 27.6, 27.7, 27.8, 27.9, or 28.0 mM NaHCO₃.

[0484] In some embodiments, the ASO as described herein is solubilized or diluted in a buffer comprising 1-100 mM KHCO₃.

[0485] In some embodiments, the ASO as described herein is solubilized or diluted in a buffer comprising 1-99, 1-95, 1-90, 1-85, 1-80, 1-75, 1-70, 1-65, 1-60, 1-55, 1-50, 1-45, 1-40, 1-35, 1-30, 1-25, 1-20, 1-15, 1-10, 1-9, 1-8, 1-7, 1-6, 1-5, 1-4, 1-3, or 1-2 mM KHCO₃. In some embodiments, the ASO as described herein is solubilized or diluted in a buffer comprising 2-100, 3-100, 4-100, 5-100, 6-100, 7-100, 8-100, 9-100, 10-100, 15-100, 20-100, 25-100, 30-100, 35-100, 40-100, 45-100, 50-100, 55-100, 60-100, 65-100, 70-100, 75-100, 80-100, 85-100, 90-100, or 95-100 mM KHCO₃. In some embodiments, the ASO as described herein is solubilized or diluted in a buffer comprising 24.0-28.0, 24.0-27.9, 24.0-27.8, 24.0-27.7, 24.0-27.6, 24.0-27.5, 24.0-27.4, 24.0-27.3, 24.0-27.2, 24.0-27.1, 24.0-27.0, 24.0-26.9, 24.0-26.8, 24.0-26.7, 24.0-26.6, 24.0-26.5, 24.0-26.4, 24.0-26.3, 24.0-26.2, 24.0-26.1, 24.0-26.0, 24.0-25.9, 4.0-25.8, 24.0-25.7, 24.0-25.6, 24.0-25.5, 24.0-25.4, 24.0-25.3, 24.0-25.2, 24.0-25.1, 24.0-25.0, 24.0-24.9, 24.0-24.8, 24.0-24.7, 24.0-24.6, 24.0-24.5, 24.0-24.4, 24.0-24.3, 24.0-24.2, or 24.0-24.1 mM KHCO₃. In some embodiments, the ASO as described herein is solubilized or diluted in a buffer comprising 24.1-28.0, 24.2-28.0, 24.3-28.0, 24.4-28.0, 24.5-28.0, 24.6-28.0, 24.7-28.0, 24.8-28.0, 24.9-28.0, 25.0-28.0, 25.1-28.0, 25.2-28.0, 25.3-28.0, 25.4-28.0, 25.5-28.0, 25.6-28.0, 25.7-28.0, 25.8-28.0, 25.9-28.0, 26.0-28.0, 26.1-28.0, 26.2-28.0, 26.3-28.0, 26.4-28.0, 26.5-28.0, 26.6-28.0, 26.7-28.0, 26.8-28.0, 26.9-28.0, 27.0-28.0, 27.1-28.0, 27.2-28.0, 27.3-28.0, 27.4-28.0, 27.5-28.0, 27.6-28.0, 27.7-28.0, 27.8-28.0, or 27.9-28.0 mM KHCO₃. In some embodiments, the ASO as described herein is solubilized or diluted in a buffer comprising at least 24.0, 24.1, 24.2, 24.3, 24.4, 24.5, 24.6, 24.7, 24.8, 24.9, 25.0, 25.1, 25.2, 25.3, 25.4, 25.5, 25.6, 25.7, 25.8, 25.9, 26.0, 26.1, 26.2, 26.3, 26.4, 26.5, 26.6, 26.7, 26.8, 26.9, 27.0, 27.1, 27.2, 27.3, 27.4, 27.5, 27.6, 27.7, 27.8, 27.9, or 28.0 mM KHCO₃. In some embodiments, the ASO as described herein is solubilized or diluted in a buffer comprising at most 24.0, 24.1, 24.2, 24.3, 24.4, 24.5, 24.6, 24.7, 24.8, 24.9, 25.0, 25.1, 25.2, 25.3, 25.4, 25.5, 25.6, 25.7, 25.8, 25.9, 26.1, 26.2, 26.3, 26.4, 26.5, 26.6, 26.7, 26.8, 26.9, 27.0, 27.1, 27.2, 27.3, 27.4, 27.5, 27.6, 27.7, 27.8, 27.9, or 28.0 mM KHCO₃. In some embodiments, the ASO as described herein is solubilized or diluted in a buffer comprising 24.0, 24.1, 24.2, 24.3, 24.4, 24.5, 24.6, 24.7, 24.8, 24.9, 25.0, 25.1, 25.2, 25.3, 25.4, 25.5, 25.6, 25.7, 25.8, 25.9, 26.1, 26.2, 26.3, 26.4, 26.5, 26.6, 26.7, 26.8, 26.9, 27.0, 27.1, 27.2, 27.3, 27.4, 27.5, 27.6, 27.7, 27.8, 27.9, or 28.0 mM KHCO₃.

[0486] In some embodiments, the ASO as described herein is solubilized or diluted in a buffer comprising 0-50 mM KH₂PO₄.

[0487] In some embodiments, the ASO as described herein is solubilized or diluted in a buffer comprising 0-100, 0.01-100, 0.02-100, 0.03-100, 0.04-100, 0.05-100, 0.06-100, 0.07-100, 0.08-100, 0.09-100, 0.1-100, 0.2-100, 0.3-100, 0.4-100, 0.5-100, 0.6-100, 0.7-100, 0.8-100, 0.9-100, 1-100, 2-100, 3-100, 4-100, 5-100, 6-100, 7-100, 8-100, 9-100, 10-100, 15-100, 20-100, 25-100, 30-100, 35-100, 40-100, 45-100, 50-100, 55-100, 60-100, 65-100, 70-100, 75-100, 80-100, 85-100, 90-100, or 95-100 mM KH₂PO₄. In some embodiments, the ASO as described herein is solubilized or diluted in a buffer comprising 0-95, 0-90, 0-85, 0-80, 0-75, 0-70, 0-65, 0-60, 0-55, 0-50, 0-45, 0-40, 0-35, 0-30, 0-25, 0-20, 0-15, 0-10, 0-9, 0-8, 0-7, 0-6, 0-5, 0-4, 0-3, 0-2, 0-1, 0-0.9, 0- 0.8, 0-0.7, 0-0.6, 0-0.5, 0-0.4, 0-0.3, 0-0.2, 0-0.1, 0-0.09, 0-0.08, 0-0.07, 0-0.06, 0-0.05, 0-0.04, 0-0.03, or 0-0.02 mM KH₂PO₄. In some embodiments, the ASO as described herein is solubilized or diluted in a buffer comprising 0.01-95, 0.01-90, 0.01-85, 0.01-80, 0.01-75, 0.01-70, 0.01-65, 0.01-60, 0.01-55, 0.01-50, 0.01-45, 0.01-40, 0.01-35, 0.01-30, 0.01-25, 0.01-20, 0.01-15, 0.01-10, 0.01-9, 0.01-8, 0.01-7, 0.01-6, 0.01-5, 0.01-4, 0.01-3, 0.01-2, 0.01-1, 0.01-0.9, 0.01-0.8, 0.01-0.7, 0.01-0.6, 0.01-0.5, 0.01-0.4, 0.01-0.3, 0.01-0.2, 0.01-0.1, 0.01-0.09, 0.01-0.08, 0.01-0.07, 0.01-0.06, 0.01-0.05, 0.01-0.04, 0.01-0.03, or 0.01-0.02 mM KH₂PO₄. In some embodiments, the ASO as described herein is solubilized or diluted in a buffer comprising 0-3.0, 0-2.9, 0-2.8, 0-2.7, 0-2.6, 0-2.5, 0-2.4, 0-2.3, 0-2.2, 0-2.1, 0-2.0, 0-1.9, 0-1.8, 0-1.7, 0-1.6, 0-1.5, 0-1.4, 0-1.3, 0-1.2, 0-1.1, 0-1.0, 0-0.9, 0-0.8, 0-0.7, 0-0.6, 0-0.5, 0-0.4, 0-0.3, or 0-0.2 mM KH₂PO₄. In some embodiments, the ASO as described herein is solubilized or diluted in a buffer comprising 0.1-3.0, 0.1-2.9, 0.1-2.8, 0.1-2.7, 0.1-2.6, 0.1-2.5, 0.1-2.4, 0.1-2.3, 0.1-2.2, 0.1-2.1, 0.1-2.0, 0.1-1.9, 0.1-1.8, 0.1-1.7, 0.1-1.6, 0.1-1.5, 0.1-1.4, 0.1-1.3, 0.1-1.2, 0.1-1.1, 0.1-1.0, 0.1-0.9, 0.1-0.8, 0.1-0.7, 0.1-0.6, 0.1-0.5, 0.1-0.4, 0.1-0.3, or 0.1-0.2 mM KH₂PO₄. In some embodiments, the ASO as described herein is solubilized or diluted in a buffer comprising 0-3.0, 0.1-3.0, 0.2-3.0, 0.3-3.0, 0.4-3.0, 0.5-3.0, 0.6-3.0, 0.7-3.0, 0.8-3.0, 0.9-3.0, 1.0-3.0, 1.2-3.0, 1.3-3.0, 1.4-3.0, 1.5-3.0, 1.6-3.0, 1.7-3.0, 1.8-3.0, 1.9-3.0, 2.0-3.0, 2.1-3.0, 2.2-3.0, 2.3-3.0, 2.4-3.0, 2.5-3.0, 2.6-3.0, 2.7-3.0, 2.8-3.0, or 2.9-3.0 mM KH₂PO₄. In some embodiments, the ASO as described herein is solubilized or diluted in a buffer comprising at least 0, 0.1, 0.2, 0.3, 0.4, 0.5, 0.6, 0.7, 0.8, 0.9, 1.0, 1.1, 1.2, 1.3, 1.4, 1.5, 1.6, 1.7, 1.8, 1.9, 2.0, 2.1, 2.2, 2.3, 2.4, 2.5, 2.6, 2.7, 2.8, 2.9, or 3.0 mM KH₂PO₄. In some embodiments, the ASO as described herein is solubilized or diluted in a buffer comprising at most 0, 0.1, 0.2, 0.3, 0.4, 0.5, 0.6, 0.7, 0.8, 0.9, 1.0, 1.1, 1.2, 1.3, 1.4, 1.5, 1.6, 1.7, 1.8, 1.9, 2.0, 2.1, 2.2, 2.3, 2.4, 2.5, 2.6, 2.7, 2.8, 2.9, or 3.0 mM KH₂PO₄. In some embodiments, the ASO as described herein is solubilized or diluted in a buffer comprising 0.1, 0.2, 0.3, 0.4, 0.5, 0.6, 0.7, 0.8, 0.9, 1.0, 1.1, 1.2, 1.3, 1.4, 1.5, 1.6, 1.7, 1.8, 1.9, 2.0, 2.1, 2.2, 2.3, 2.4, 2.5, 2.6, 2.7, 2.8, 2.9, or 3.0 mM KH₂PO₄.

[0488] In some embodiments, the ASO as described herein is solubilized or diluted in a buffer comprising 0-50 mM NaH₂PO₄.

[0489] In some embodiments, the ASO as described herein is solubilized or diluted in a buffer comprising 0-50, 0-45, 0-40, 0-35, 0-30, 0-25, 0-20, 0-19, 0-18, 0-17, 0-16, 0-15, 0-14, 0-13, 0-12, 0-11, 0-10, 0-9, 0-8, 0-7, 0-6, 0-5, 0-4, 0-3, 0-2, 0-1, 0-0.9, 0-0.8, 0-0.7, 0-0.6, 0-0.5, 0-0.4, 0-0.3, or 0-0.2 mM NaH₂PO₄. In some embodiments, the ASO as described herein is solubilized or diluted in a buffer comprising 0.1-50, 0.1-45, 0.1-40, 0.1-35, 0.1-30, 0.1-25, 0.1-20, 0.1-19, 0.1-18, 0.1-17, 0.1-16, 0.1-15, 0.1-14, 0.1-13, 0.1-12, 0.1-11, 0.1-10, 0.1-9, 0.1-8, 0.1-7, 0.1-6, 0.1-5, 0.1-4, 0.1-3, 0.1-2, 0.1-1, 0.1-0.9, 0.1-0.8, 0.1-0.7, 0.1-0.6, 0.1-0.5, 0.1-0.4, 0.1-0.3, or 0.1-0.2 mM NaH₂PO₄. In some embodiments, the ASO as described herein is solubilized or diluted in a buffer comprising 0-50, 0.1-50, 0.2-50, 0.3-50, 0.4-50, 0.5-50, 0.6-50, 0.7-50, 0.8-50, 0.9-50, 1-50, 2-50, 3-50, 4-50, 5-50, 6-50, 7-50, 8-50, 9-50, 1-50, 11-50, 12-50, 13-50, 14-50, 15-50, 16-50, 17-50, 18-50, 19-50, 20-50, 25-50, 30-50, 35-50, 40-50, or 45-50 mM NaH₂PO₄. In some embodiments, the ASO as described herein is solubilized or diluted in a buffer comprising 0-20, 0.1-20, 0.2-20, 0.3-20, 0.4-20, 0.5-20, 0.6-20, 0.7-20, 0.8-20, 0.9-20, 1-20, 2-20, 3-20, 4-20, 5-20, 6-20, 7-20, 8-20, 9-20, 10-20, 11-20, 12-20, 13-20, 14-20, 15-20, 16-20, 17-20, 18-20, or 19-20 mM NaH₂PO₄. In some embodiments, the ASO as described herein is solubilized or diluted in a buffer comprising at least 0, 0.1, 0.2, 0.3, 0.4, 0.5, 0.6, 0.7, 0.8, 0.9, 1, 2, 3, 4, 5, 6, 7, 8, 9, 10, 11, 12, 13, 14, 15, 16, 17, 18, 19, or 20 mM NaH₂PO₄. In some embodiments, the ASO as described herein is solubilized or diluted in a buffer comprising at most 0, 0.1, 0.2, 0.3, 0.4, 0.5, 0.6, 0.7, 0.8, 0.9, 1, 2, 3, 4, 5, 6, 7, 8, 9, 10, 11, 12, 13, 14, 15, 16, 17, 18, 19, or 20 mM NaH₂PO₄. In some embodiments, the ASO as described herein is solubilized or diluted in a buffer comprising 0, 0.1, 0.2, 0.3, 0.4, 0.5, 0.6, 0.7, 0.8, 0.9, 1, 2, 3, 4, 5, 6, 7, 8, 9, 10, 11, 12, 13, 14, 15, 16, 17, 18, 19, or 20 mM NaH₂PO₄.

[0490] In some embodiments, the ASO is solubilized or diluted in a buffer further comprising carbohydrates. In some embodiments, the carbohydrates comprise D-glucose. In some embodiments, the ASO is solubilized or diluted in a buffer further comprising 1-100 mM D-glucose.

[0491] In some embodiments, the ASO as described herein is solubilized or diluted in a buffer comprising 1-100 mM D-glucose.

[0492] In some embodiments, the ASO as described herein is solubilized or diluted in a buffer comprising 1-100, 1-95, 1-90, 1-85, 1-80, 1-75, 1-70, 1-65, 1-60, 1-55, 1-50, 1-45, 1-40, 1-35, 1-30, 1-29, 1-28, 1-27, 1-26, 1-25, 1-24, 1-23, 1-22, 1-21, 1-20, 1-19, 1-18, 1-17, 1-16, 1-15, 1-14, 1-13, 1-12, 1-11, 1-10, 1-9, 1-8, 1-7, 1-6, 1-5, 1-4, 1-3, or 1-2 mM D-glucose. In some embodiments, the ASO as described herein is solubilized or diluted in a buffer comprising 2-100, 3-100, 4-100, 5-100, 6-100, 7-100, 8-100, 9-100, 10-100, 11-100, 12-100, 13-100, 14-100, 15-100, 16-100, 17-100, 18-100, 19-100, 20-100, 21-100, 22-100, 23-100, 24-100, 25-100, 26-100, 29-100, 28-100, 29-100, 30-100, 35-100, 40-100, 45-100, 50-100, 55-100, 60-100, 65-100, 70-100, 75-100, 80-100, 85-100, 90-100, or 95-100 mM D-glucose. In some embodiments, the ASO as described herein is solubilized or diluted in a buffer comprising 2-30, 3-30, 4-30, 5-30, 6-30, 7-30, 8-30, 9-30, 10-30, 11-30, 12-30, 13-30, 14-30, 15-30, 16-30, 17-30, 18-30, 19-30, 20-30, 21-30, 22-30, 23-30, 24-30, 25-30, 26-30, 27-30, 28-30, or 29-30 mM D-glucose. In some embodiments, the ASO as described herein is solubilized or diluted in a buffer comprising at least 1, 2, 3, 4, 5, 6, 7, 8, 9, 10, 11, 12, 13, 14, 15, 16, 17, 18, 19, 20, 21, 22, 23, 24, 25, 26, 27, 28, 29, or 30 mM D-glucose. In some embodiments, the ASO as described herein is solubilized or diluted in a buffer comprising at most 1, 2, 3, 4, 5, 6, 7, 8, 9, 10, 11, 12, 13, 14, 15, 16, 17, 18, 19, 20, 21, 22, 23, 24, 25, 26, 27, 28, 29, or 30 mM D-glucose. In some embodiments, the ASO as described herein is solubilized or diluted in a buffer comprising 1, 2, 3, 4, 5, 6, 7, 8, 9, 10, 11, 12, 13, 14, 15, 16, 17, 18, 19, 20, 21, 22, 23, 24, 25, 26, 27, 28, 29, or 30 mM D-glucose.

[0493] In some embodiments, the ASO is solubilized or diluted in a buffer comprising 25-250 mM NaCl, 0.1-20 mM KCl, 0.1-50 mM Na₂HPO₄, 0.1-50 mM NaH₂PO₄, 0.1-50 mM CaCl₂, and 0.1-50 mM MgCl₂.

[0494] In some embodiments, the ASO is solubilized or diluted in a buffer comprising 150 mM NaCl, 3.0 mM KCl, 0.7 mM Na₂HPO₄, 0.3 mM NaH₂PO₄, 0.79 mM MgCl₂, and 1.4 mM CaCl₂.

[0495] In some embodiments, the ASO is solubilized or diluted in a buffer further comprising an antioxidant. In some embodiments, the antioxidant is t-butylhydroxyquinoline (TBHQ), buylated hydroxytolune (BHT), butylated hydroxyanisole (BHA), vitamin E, or any combination thereof. In some embodiments, the ASO is solubilized or diluted in a buffer further comprising an antioxidant, wherein the antioxidant is ascorbic acid (vitamin C), glutathione, lipoic acid, uric acid, carotenes, α-tocopherol (vitamin E), ubiquinol (coenzyme Q), or any combination thereof.

[0496] In some embodiments, the ASO as described herein is solubilized or diluted in a buffer comprising 25-250 mM NaCl, 0.1-20 mM KCl, 0-50 mM KH₂PO4, 1-100 mM NaHCO₃, 0-50 mM NaH2PO4, 1-100 mM D-glucose, 0.1-50 mM CaCl₂, 0.1-50 mM MgCl₂, or any combination thereof.

[0497] In some embodiments, the ASO as described herein is solubilized or diluted in a buffer comprising 25-250 mM NaCl, 0.1-20 mM KCl, 0-50 mM KH₂PO4, 1-100 mM NaHCO₃, 0-50 mM NaH2PO4, 1-100 mM D-glucose, 0.1-50 mM CaCl₂, and 0.1-50 mM MgCl₂.

[0498] In some embodiments, the ASO as described herein is solubilized or diluted in a buffer comprising 127 mM NaCl, 1.0 mM KCl, 1.2 mM KH₂PO₄, 26 mM NaHCO₃, 10 mM D-glucose, 2.4 mM CaCl₂, and 1.3 mM MgCl₂.

[0499] In some embodiments, the ASO as described herein is solubilized or diluted in a buffer comprising 119 mM NaCl, 26.2 mM NaHCO₃, 2.5 mM KCl, 1 mM NaH₂PO4, 1.3 mM MgCl₂, 10 mM glucose, and 2.5 mM CaCl₂.

[0500] In some embodiments, the pharmaceutical formulation does not comprise a preservative. In some embodiments, the pharmaceutical formulation comprises a preservative.

[0501] In some embodiments, the ASO as described herein is solubilized or diluted to a concentration of from 5-250 mg/mL in the diluent.

[0502] In some embodiments, the ASO as described herein is solubilized or diluted to a concentration of from 5-250, 5-247.5, 5-245, 5-242.5, 5-240, 5-237.5, 5-235, 5-232.5, 5-230, 5-227.5, 5-225, 5-225.5, 5-220, 5-217.5, 5-215, 5-212.5, 5-210, 5-205.5, 5-205, 5-202.5, 5-200, 5-197.5, 5-195, 5-192.5, 5-190, 5-187.5, 5-185, 5-182.5, 5-180, 5-177.5, 5-175, 5-172.5, 5-170, 5-167.5, 5-165, 5-162.5, 5-160, 5-157.5, 5-155, 5-152.5, 5-150, 5-147.5, 5-145, 5-142.5, 5-140, 5-137.5, 5-135, 5-132.5, 5-130, 5-127.5, 5-125, 5-122.5, 5-120, 5-117.5, 5-115, 5-112.5, 5-110, 5-107.5, 5-105, 5-102.5, 5-100, 5-97.5, 5-95, 5-92.5, 5-90, 5-87.5, 5-85, 5-82.5, 5-80, 5-77.5, 5-75, 5-72.5, 5-70, 5-67.5, 5-65, 5-62.5, 5-60, 5-57.5, 5-55, 5-52.5, 5-50, 5-47.5, 5-45, 5-42.5, 5-40, 5-37.5, 5-35, 5-32.5, 5-30, 5-27.5, 5-25, 5-22.5, 5-20, 5-17.5, 5-15, 5-12.5, or 5-10 mg/mL in the diluent. In some embodiments, the ASO as described herein is solubilized or diluted to a concentration of from 10-250, 15-250, 20-250, 25-250, 30-250, 35-250, 40-250, 45-250, 50-250, 55-250, 60-250, 65-250, 70-250, 75-250, 80-250, 85-250, 90-250, 95-250, 100-250, 105-250, 110-250, 115-250, 120-250, 125-250, 130-250, 135-250, 140-250, 145-250, 150-250, 155-250, 160-250, 165-250, 170-250, 175-250, 180-250, 185-250, 190-250, or 195-250, 200-250, 205-250, 210-250, 215-250, 220-250, 225-250, 230-250, 235-250, 240-250, or 245-250 mg/mL in the diluent. In some embodiments, the ASO as described herein is solubilized or diluted to a concentration of from at least 1, 2, 3, 4, 5, 6, 7, 8, 9, 10, 11, 12, 13, 14, 15, 16, 17, 18, 19, 20, 21, 22, 23, 24, 25, 26, 27, 28, 29, 30, 31, 32, 33, 34, 35, 36, 37, 38, 39, 40, 41, 42, 43, 44, 45, 46, 47, 48, 49, 50, 51, 52, 53, 54, 55, 56, 57, 58, 59, 60, 61, 62, 63, 64, 65, 66, 67, 68, 69, 70, 71, 72, 73, 74, 75, 76, 77, 78, 79, 80, 81, 82, 83, 84, 85, 86, 87, 88, 89, 90, 91, 92, 93, 94, 95, 96, 97, 98, 99, 100, 101, 102, 103, 104, 105, 106, 107, 108, 109, 110, 111, 112, 113, 114, 115, 116, 117, 118, 119, 120, 121, 122, 123, 124, 125, 126, 127, 128, 129, 130, 131, 132, 133, 134, 135, 136, 137, 138, 139, 140, 141, 142, 143, 144, 145, 146, 147, 148, 149, 150, 151, 152, 153, 154, 155, 156, 157, 158, 159, 160, 161, 162, 163, 164, 165, 166, 167, 168, 169, 170, 171, 172, 173, 174, 175, 176, 177, 178, 179, 180, 181, 182, 183, 184, 185, 186, 187, 188, 189, 190, 191, 192, 193, 194, 195, 196, 197, 198, 199, 200, 210, 211, 212, 213, 214, 215, 216, 217, 218, 219, 220, 221, 222, 223, 224, 225, 226, 227, 228, 229, 230, 231, 232, 233, 234, 235, 236, 237, 238, 239, 240, 241, 242, 243, 244, 245, 246, 247, 248, 249, or 250 mg/mL in the diluent. In some embodiments, the ASO as described herein is solubilized or diluted to a concentration of from at most 1, 2, 3, 4, 5, 6, 7, 8, 9, 10, 11, 12, 13, 14, 15, 16, 17, 18, 19, 20, 21, 22, 23, 24, 25, 26, 27, 28, 29, 30, 31, 32, 33, 34, 35, 36, 37, 38, 39, 40, 41, 42, 43, 44, 45, 46, 47, 48, 49, 50, 51, 52, 53, 54, 55, 56, 57, 58, 59, 60, 61, 62, 63, 64, 65, 66, 67, 68, 69, 70, 71, 72, 73, 74, 75, 76, 77, 78, 79, 80, 81, 82, 83, 84, 85, 86, 87, 88, 89, 90, 91, 92, 93, 94, 95, 96, 97, 98, 99, 100, 101, 102, 103, 104, 105, 106, 107, 108, 109, 110, 111, 112, 113, 114, 115, 116, 117, 118, 119, 120, 121, 122, 123, 124, 125, 126, 127, 128, 129, 130, 131, 132, 133, 134, 135, 136, 137, 138, 139, 140, 141, 142, 143, 144, 145, 146, 147, 148, 149, 150, 151, 152, 153, 154, 155, 156, 157, 158, 159, 160, 161, 162, 163, 164, 165, 166, 167, 168, 169, 170, 171, 172, 173, 174, 175, 176, 177, 178, 179, 180, 181, 182, 183, 184, 185, 186, 187, 188, 189, 190, 191, 192, 193, 194, 195, 196, 197, 198, 199, 200, 210, 211, 212, 213, 214, 215, 216, 217, 218, 219, 220, 221, 222, 223, 224, 225, 226, 227, 228, 229, 230, 231, 232, 233, 234, 235, 236, 237, 238, 239, 240, 241, 242, 243, 244, 245, 246, 247, 248, 249, or 250 mg/mL in the diluent. In some embodiments, the ASO as described herein is solubilized or diluted to a concentration of from 1, 2, 3, 4, 5, 6, 7, 8, 9, 10, 11, 12, 13, 14, 15, 16, 17, 18, 19, 20, 21, 22, 23, 24, 25, 26, 27, 28, 29, 30, 31, 32, 33, 34, 35, 36, 37, 38, 39, 40, 41, 42, 43, 44, 45, 46, 47, 48, 49, 50, 51, 52, 53, 54, 55, 56, 57, 58, 59, 60, 61, 62, 63, 64, 65, 66, 67, 68, 69, 70, 71, 72, 73, 74, 75, 76, 77, 78, 79, 80, 81, 82, 83, 84, 85, 86, 87, 88, 89, 90, 91, 92, 93, 94, 95, 96, 97, 98, 99, 100, 101, 102, 103, 104, 105, 106, 107, 108, 109, 110, 111, 112, 113, 114, 115, 116, 117, 118, 119, 120, 121, 122, 123, 124, 125, 126, 127, 128, 129, 130, 131, 132, 133, 134, 135, 136, 137, 138, 139, 140, 141, 142, 143, 144, 145, 146, 147, 148, 149, 150, 151, 152, 153, 154, 155, 156, 157, 158, 159, 160, 161, 162, 163, 164, 165, 166, 167, 168, 169, 170, 171, 172, 173, 174, 175, 176, 177, 178, 179, 180, 181, 182, 183, 184, 185, 186, 187, 188, 189, 190, 191, 192, 193, 194, 195, 196, 197, 198, 199, 200, 210, 211, 212, 213, 214, 215, 216, 217, 218, 219, 220, 221, 222, 223, 224, 225, 226, 227, 228, 229, 230, 231, 232, 233, 234, 235, 236, 237, 238, 239, 240, 241, 242, 243, 244, 245, 246, 247, 248, 249, or 250 mg/mL in the diluent.

[0503] In some embodiments, the ASO as described herein is present in the pharmaceutical composition at a concentration of the ASO is present in the pharmaceutical composition at a concentration of from 0.1 mg/mL to 250 mg/mL. In some embodiments, the ASO as described herein is present in the pharmaceutical composition at a concentration of about 0.1 mg/mL, 0.5 mg/mL, 1 mg/mL, 2 mg/mL, 2.5 mg/mL, 3 mg/mL, 4 mg/mL, 5 mg/mL, 6 mg/mL, 7 mg/mL, 8 mg/mL, 9 mg/mL, 10 mg/mL, 11 mg/mL, 12 mg/mL, 13 mg/mL, 14 mg/mL, 15 mg/mL, 16 mg/mL, 17 mg/mL, 18 mg/mL, 19 mg/mL, or 20 mg/mL. In some embodiments, the ASO as described herein is present in the pharmaceutical composition at a concentration of about 30 mg/mL, 40 mg/mL, 50 mg/mL, 60 mg/mL, 70 mg/mL, 80 mg/mL, 90 mg/mL, 100 mg/mL, 110 mg/mL, 120 mg/mL, 130 mg/mL, 140 mg/mL, 150 mg/mL, 160 mg/mL, 170 mg/mL, 180 mg/mL, 190 mg/mL, or 200 mg/mL. In some embodiments, the ASO is present in the pharmaceutical composition at a concentration of about 22.5 mg/mL, 25 mg/mL, 27.5 mg/mL, 30 mg/mL, 32.5 mg/mL, 35 mg/mL, 37.5 mg/mL, 40 mg/mL, 42.5 mg/mL, 45 mg/mL, 47.5 mg/mL, 50 mg/mL, 52.5 mg/mL, 55 mg/mL, 57.5 mg/mL, 60 mg/mL, 62.5 mg/mL, 65 mg/mL, 67.5 mg/mL, 70 mg/mL, 72.5 mg/mL, 75 mg/mL, 77.5 mg/mL, 80 mg/mL, 82.5 mg/mL, 85 mg/mL, 87.5 mg/mL, 90 mg/mL, 92.5 mg/mL, 95 mg/mL, 97.5 mg/mL, 100 mg/mL, 102.5 mg/mL, 105 mg/mL, 107.5 mg/mL, 110 mg/mL, 112.5 mg/mL, 115 mg/mL, 117.5 mg/mL, 120 mg/mL, 122.5 mg/mL, 125 mg/mL, 127.5 mg/mL, 130 mg/mL, 132.5 mg/mL, 135 mg/mL, 137.5 mg/mL, 140 mg/mL, 142.5 mg/mL, 145 mg/mL, 147.5 mg/mL, 150 mg/mL, 152.5 mg/mL, 155 mg/mL, 157.5 mg/mL, 160 mg/mL, 162.5 mg/mL, 165 mg/mL, 167.5 mg/mL, 170 mg/mL, 172.5 mg/mL, 175 mg/mL, 177.5 mg/mL, 180 mg/mL, 182.5 mg/mL, 185 mg/mL, 187.5 mg/mL, 190 mg/mL, 192.5 mg/mL, 195 mg/mL, 197.5 mg/mL, 200 mg/mL, 202.5 mg/mL, 205 mg/mL, 207.5 mg/mL, 210 mg/mL, 212.5 mg/mL, 215 mg/mL, 217.5 mg/mL, 220 mg/mL, 222.5 mg/mL, 225 mg/mL, 227.5 mg/mL, 230 mg/mL, 232.5 mg/mL, 235 mg/mL, 237.5 mg/mL, 240 mg/mL, 242.5 mg/mL, 245 mg/mL, 247.5 mg/mL, or 250 mg/mL. In some embodiments, the ASO as described herein is solubilized or diluted to a concentration of 11 mg/mL, 22 mg/mL, 33 mg/mL, 44 mg/mL, 55 mg/mL, 66 mg/mL, 77 mg/mL, 88 mg/mL, 99 mg/mL, or 100 mg/mL in the diluent.

[0504] In some embodiments, the ASO as described herein is present in the pharmaceutical composition at a concentration of from 0.1 mg/mL to 250 mg/mL, from 0.2 mg/mL to 250 mg/mL, from 0.3 mg/mL to 250 mg/mL, from 0.4 mg/mL to 250 mg/mL, from 0.5 mg/mL to 250 mg/mL, from 0.6 mg/mL to 250 mg/mL, from 0.7 mg/mL to 250 mg/mL, from 0.8 mg/mL to 250 mg/mL, from 0.9 mg/mL to 250 mg/mL, from 1.0 mg/mL to 250 mg/mL, from 1.1 mg/mL to 250 mg/mL, from 1.2 mg/mL to 250 mg/mL, from 1.3 mg/mL to 250 mg/mL, from 1.4 mg/mL to 250 mg/mL, from 1.5 mg/mL to 250 mg/mL, from 1.6 mg/mL to 250 mg/mL, from 1.7 mg/mL to 250 mg/mL, from 1.8 mg/mL to 250 mg/mL, from 1.9 mg/mL to 250 mg/mL, from 2.0 mg/mL to 250 mg/mL, from 2.1 mg/mL to 250 mg/mL, from 2.2 mg/mL to 250 mg/mL, from 2.3 mg/mL to 250 mg/mL, from 2.4 mg/mL to 250 mg/mL, from 2.5 mg/mL to 250 mg/mL, from 2.6 mg/mL to 250 mg/mL, from 2.7 mg/mL to 250 mg/mL, from 2.8 mg/mL to 250 mg/mL, from 2.9 mg/mL to 250 mg/mL, from 3.0 mg/mL to 250 mg/mL, from 3.1 mg/mL to 250 mg/mL, from 3.2 mg/mL to 250 mg/mL, from 3.3 mg/mL to 250 mg/mL, from 3.4 mg/mL to 250 mg/mL, from 3.5 mg/mL to 250 mg/mL, from 3.6 mg/mL to 250 mg/mL, from 3.7 mg/mL to 250 mg/mL, from 3.8 mg/mL to 250 mg/mL, from 3.9 mg/mL to 250 mg/mL, from 4.0 mg/mL to 250 mg/mL, from 5.0 mg/mL to 250 mg/mL, from 6.0 mg/mL to 250 mg/mL, from 7.0 mg/mL to 250 mg/mL, from 8.0 mg/mL to 250 mg/mL, from 9.0 mg/mL to 250 mg/mL, from 10 mg/mL to 250 mg/mL, from 15 mg/mL to 250 mg/mL, from 20 mg/mL to 250 mg/mL, from 25 mg/mL to 250 mg/mL, from 30 mg/mL to 250 mg/mL, from 35 mg/mL to 250 mg/mL, from 40 mg/mL to 250 mg/mL, from 45 mg/mL to 250 mg/mL, from 50 mg/mL to 250 mg/mL, from 55 mg/mL to 250 mg/mL, from 60 mg/mL to 250 mg/mL, from 65 mg/mL to 250 mg/mL, from 70 mg/mL to 250 mg/mL, from 75 mg/mL to 250 mg/mL, from 80 mg/mL to 250 mg/mL, from 85 mg/mL to 250 mg/mL, from 90 mg/mL to 250 mg/mL, from 95 mg/mL to 250 mg/mL, from 100 mg/mL to 250 mg/mL, from 105 mg/mL to 250 mg/mL, from 110 mg/mL to 250 mg/mL, from 115 mg/mL to 250 mg/mL, from 120 mg/mL to 250 mg/mL, from 125 mg/mL to 250 mg/mL, from 130 mg/mL to 250 mg/mL, from 135 mg/mL to 250 mg/mL, from 140 mg/mL to 250 mg/mL, from 145 mg/mL to 250 mg/mL, from 150 mg/mL to 250 mg/mL, from 155 mg/mL to 250 mg/mL, from 160 mg/mL to 250 mg/mL, from 165 mg/mL to 250 mg/mL, from 170 mg/mL to 250 mg/mL, from 175 mg/mL to 250 mg/mL, from 180 mg/mL to 250 mg/mL, from 185 mg/mL to 250 mg/mL, from 190 mg/mL to 250 mg/mL, from 195 mg/mL to 250 mg/mL, 200 mg/mL to 250 mg/mL, from 205 mg/mL to 250 mg/mL, from 210 mg/mL to 250 mg/mL, from 215 mg/mL to 250 mg/mL, from 220 mg/mL to 250 mg/mL, from 225 mg/mL to 250 mg/mL, from 230 mg/mL to 250 mg/mL, from 235 mg/mL to 250 mg/mL, from 240 mg/mL to 250 mg/mL, or from 245 mg/mL to 250 mg/mL.

[0505] In some embodiments, the ASO as described herein is present in the pharmaceutical composition at a concentration of from 0.1 mg/mL to 250 mg/mL, from 0.1 mg/mL to 245 mg/mL, from 0.1 mg/mL to 240 mg/mL, from 0.1 mg/mL to 235 mg/mL, from 0.1 mg/mL to 230 mg/mL, from 0.1 mg/mL to 225 mg/mL, from 0.1 mg/mL to 220 mg/mL, from 0.1 mg/mL to 215 mg/mL, from 0.1 mg/mL to 210 mg/mL, from 0.1 mg/mL to 205 mg/mL, from 0.1 mg/mL to 200 mg/mL, from 0.1 mg/mL to 195 mg/mL, from 0.1 mg/mL to 190 mg/mL, from 0.1 mg/mL to 185 mg/mL, from 0.1 mg/mL to 180 mg/mL, from 0.1 mg/mL to 175 mg/mL, from 0.1 mg/mL to 170 mg/mL, from 0.1 mg/mL to 165 mg/mL, from 0.1 mg/mL to 160 mg/mL, from 0.1 mg/mL to 155 mg/mL, from 0.1 mg/mL to 150 mg/mL, from 0.1 mg/mL to 145 mg/mL, from 0.1 mg/mL to 140 mg/mL, from 0.1 mg/mL to 135 mg/mL, from 0.1 mg/mL to 130 mg/mL, from 0.1 mg/mL to 125 mg/mL, from 0.1 mg/mL to 120 mg/mL, from 0.1 mg/mL to 115 mg/mL, from 0.1 mg/mL to 110 mg/mL, from 0.1 mg/mL to 100 mg/mL, from 0.1 mg/mL to 95 mg/mL, from 0.1 mg/mL to 90 mg/mL, from 0.1 mg/mL to 85 mg/mL, from 0.1 mg/mL to 80 mg/mL, from 0.1 mg/mL to 75 mg/mL, from 0.1 mg/mL to 70 mg/mL, from 0.1 mg/mL to 65 mg/mL, from 0.1 mg/mL to 60 mg/mL, from 0.1 mg/mL to 55 mg/mL, from 0.1 mg/mL to 50 mg/mL, from 0.1 mg/mL to 45 mg/mL, from 0.1 mg/mL to 40 mg/mL, from 0.1 mg/mL to 35 mg/mL, from 0.1 mg/mL to 30 mg/mL, from 0.1 mg/mL to 25 mg/mL, from 0.1 mg/mL to 20 mg/mL, from 0.1 mg/mL to 15 mg/mL, from 0.1 mg/mL to 10 mg/mL, from 0.1 mg/mL to 9 mg/mL, from 0.1 mg/mL to 8 mg/mL, from 0.1 mg/mL to 7 mg/mL, from 0.1 mg/mL to 6 mg/mL, from 0.1 mg/mL to 5 mg/mL, from 0.1 mg/mL to 4 mg/mL, from 0.1 mg/mL to 3.9 mg/mL, from 0.1 mg/mL to 3.8 mg/mL, from 0.1 mg/mL to 3.7 mg/mL, from 0.1 mg/mL to 3.6 mg/mL, from 0.1 mg/mL to 3.5 mg/mL, from 0.1 mg/mL to 3.4 mg/mL, from 0.1 mg/mL to 3.3 mg/mL, from 0.1 mg/mL to 3.2 mg/mL, from 0.1 mg/mL to 3.1 mg/mL, from 0.1 mg/mL to 3.0 mg/mL, from 0.1 mg/mL to 2.9 mg/mL, from 0.1 mg/mL to 2.8 mg/mL, from 0.1 mg/mL to 2.7 mg/mL, from 0.1 mg/mL to 2.6 mg/mL, from 0.1 mg/mL to 2.5 mg/mL, from 0.1 mg/mL to 2.4 mg/mL, from 0.1 mg/mL to 2.3 mg/mL, from 0.1 mg/mL to 2.2 mg/mL, from 0.1 mg/mL to 2.1 mg/mL, from 0.1 mg/mL to 2.0 mg/mL, from 0.1 mg/mL to 1.9 mg/mL, from 0.1 mg/mL to 1.8 mg/mL, from 0.1 mg/mL to 1.7 mg/mL, from 0.1 mg/mL to 1.6 mg/mL, from 0.1 mg/mL to 1.5 mg/mL, from 0.1 mg/mL to 1.4 mg/mL, from 0.1 mg/mL to 1.3 mg/mL, from 0.1 mg/mL to 1.2 mg/mL, from 0.1 mg/mL to 1.1 mg/mL, from 0.1 mg/mL to 1.0 mg/mL, from 0.1 mg/mL to 0.9 mg/mL, from 0.1 mg/mL to 0.8 mg/mL, from 0.1 mg/mL to 0.7 mg/mL, from 0.1 mg/mL to 0.6 mg/mL, from 0.1 mg/mL to 0.5 mg/mL, from 0.1 mg/mL to 0.4 mg/mL, from 0.1 mg/mL to 0.3 mg/mL, or from 0.1 mg/mL to 0.2 mg/mL.

[0506] In some embodiments, the ASO as described herein is solubilized or diluted to a concentration of at least 0.1, 0.2, 0.3, 0.4, 0.5, 0.6, 0.7, 0.8, 0.9, 1.0, 1.1, 1.2, 1.3, 1.4, 1.5, 1.6, 1.7, 1.8, 1.9, 2.0, 2.1, 2.2, 2.3, 2.4, 2.5, 2.6, 2.7, 2.8, 2.9, 3.0, 3.1, 3.2, 3.3, 3.4, 3.5, 3.6, 3.7, 3.8, 3.9, 4.0, 4.1, 4.2, 4.3, 4.4, 4.5, 4.6, 4.7, 4.8, 4.9, 5, 6, 7, 8, 9, 10, 11, 12, 13, 14, 15, 16, 17, 18, 19, 20, 21, 22, 23, 24, 25, 26, 27, 28, 29, 30, 31, 32, 33, 34, 35, 36, 37, 38, 39, 40, 41, 42, 43, 44, 45, 46, 47, 48, 49, 50, 51, 52, 53, 54, 55, 56, 57, 58, 59, 60, 61, 62, 63, 64, 65, 66, 67, 68, 69, 70, 71, 72, 73, 74, 75, 76, 77, 78, 79, 80, 81, 82, 83, 84, 85, 86, 87, 88, 89, 90, 91, 92, 93, 94, 95, 96, 97, 98, 99, 100, 101, 102, 103, 104, 105, 106, 107, 108, 109, 110, 111, 112, 113, 114, 115, 116, 117, 118, 119, 120, 121, 122, 123, 124, 125, 126, 127, 128, 129, 130, 131, 132, 133, 134, 135, 136, 137, 138, 139, 140, 141, 142, 143, 144, 145, 146, 147, 148, 149, 150, 151, 152, 153, 154, 155, 156, 157, 158, 159, 160, 161, 162, 163, 164, 165, 166, 167, 168, 169, 170, 171, 172, 173, 174, 175, 176, 177, 178, 179, 180, 181, 182, 183, 184, 185, 186, 187, 188, 189, 190, 191, 192, 193, 194, 195, 196, 197, 198, 199, 200, 210, 211, 212, 213, 214, 215, 216, 217, 218, 219, 220, 221, 222, 223, 224, 225, 226, 227, 228, 229, 230, 231, 232, 233, 234, 235, 236, 237, 238, 239, 240, 241, 242, 243, 244, 245, 246, 247, 248, 249, or 250 mg/mL in the diluent. In some embodiments, the ASO as described herein is solubilized or diluted to a concentration of at most 0.1, 0.2, 0.3, 0.4, 0.5, 0.6, 0.7, 0.8, 0.9, 1.0, 1.1, 1.2, 1.3, 1.4, 1.5, 1.6, 1.7, 1.8, 1.9, 2.0, 2.1, 2.2, 2.3, 2.4, 2.5, 2.6, 2.7, 2.8, 2.9, 3.0, 3.1, 3.2, 3.3, 3.4, 3.5, 3.6, 3.7, 3.8, 3.9, 4.0, 4.1, 4.2, 4.3, 4.4, 4.5, 4.6, 4.7, 4.8, 4.9, 5, 6, 7, 8, 9, 10, 11, 12, 13, 14, 15, 16, 17, 18, 19, 20, 21, 22, 23, 24, 25, 26, 27, 28, 29, 30, 31, 32, 33, 34, 35, 36, 37, 38, 39, 40, 41, 42, 43, 44, 45, 46, 47, 48, 49, 50, 51, 52, 53, 54, 55, 56, 57, 58, 59, 60, 61, 62, 63, 64, 65, 66, 67, 68, 69, 70, 71, 72, 73, 74, 75, 76, 77, 78, 79, 80, 81, 82, 83, 84, 85, 86, 87, 88, 89, 90, 91, 92, 93, 94, 95, 96, 97, 98, 99, 100, 101, 102, 103, 104, 105, 106, 107, 108, 109, 110, 111, 112, 113, 114, 115, 116, 117, 118, 119, 120, 121, 122, 123, 124, 125, 126, 127, 128, 129, 130, 131, 132, 133, 134, 135, 136, 137, 138, 139, 140, 141, 142, 143, 144, 145, 146, 147, 148, 149, 150, 151, 152, 153, 154, 155, 156, 157, 158, 159, 160, 161, 162, 163, 164, 165, 166, 167, 168, 169, 170, 171, 172, 173, 174, 175, 176, 177, 178, 179, 180, 181, 182, 183, 184, 185, 186, 187, 188, 189, 190, 191, 192, 193, 194, 195, 196, 197, 198, 199, 200, 210, 211, 212, 213, 214, 215, 216, 217, 218, 219, 220, 221, 222, 223, 224, 225, 226, 227, 228, 229, 230, 231, 232, 233, 234, 235, 236, 237, 238, 239, 240, 241, 242, 243, 244, 245, 246, 247, 248, 249, or 250 mg/mL in the diluent. In some embodiments, the ASO as described herein is solubilized or diluted to a concentration of 0.1, 0.2, 0.3, 0.4, 0.5, 0.6, 0.7, 0.8, 0.9, 1.0, 1.1, 1.2, 1.3, 1.4, 1.5, 1.6, 1.7, 1.8, 1.9, 2.0, 2.1, 2.2, 2.3, 2.4, 2.5, 2.6, 2.7, 2.8, 2.9, 3.0, 3.1, 3.2, 3.3, 3.4, 3.5, 3.6, 3.7, 3.8, 3.9, 4.0, 4.1, 4.2, 4.3, 4.4, 4.5, 4.6, 4.7, 4.8, 4.9, 5, 6, 7, 8, 9, 10, 11, 12, 13, 14, 15, 16, 17, 18, 19, 20, 21, 22, 23, 24, 25, 26, 27, 28, 29, 30, 31, 32, 33, 34, 35, 36, 37, 38, 39, 40, 41, 42, 43, 44, 45, 46, 47, 48, 49, 50, 51, 52, 53, 54, 55, 56, 57, 58, 59, 60, 61, 62, 63, 64, 65, 66, 67, 68, 69, 70, 71, 72, 73, 74, 75, 76, 77, 78, 79, 80, 81, 82, 83, 84, 85, 86, 87, 88, 89, 90, 91, 92, 93, 94, 95, 96, 97, 98, 99, 100, 101, 102, 103, 104, 105, 106, 107, 108, 109, 110, 111, 112, 113, 114, 115, 116, 117, 118, 119, 120, 121, 122, 123, 124, 125, 126, 127, 128, 129, 130, 131, 132, 133, 134, 135, 136, 137, 138, 139, 140, 141, 142, 143, 144, 145, 146, 147, 148, 149, 150, 151, 152, 153, 154, 155, 156, 157, 158, 159, 160, 161, 162, 163, 164, 165, 166, 167, 168, 169, 170, 171, 172, 173, 174, 175, 176, 177, 178, 179, 180, 181, 182, 183, 184, 185, 186, 187, 188, 189, 190, 191, 192, 193, 194, 195, 196, 197, 198, 199, 200, 210, 211, 212, 213, 214, 215, 216, 217, 218, 219, 220, 221, 222, 223, 224, 225, 226, 227, 228, 229, 230, 231, 232, 233, 234, 235, 236, 237, 238, 239, 240, 241, 242, 243, 244, 245, 246, 247, 248, 249, or 250 mg/mL in the diluent.

[0507] In some embodiments, the pharmaceutical formulation does not comprise a preservative. In some embodiments, the pharmaceutical formulation comprises a preservative.

[0508] A pharmaceutical composition used in the therapeutic methods of the invention is formulated to be compatible with its intended route of administration.

[0509] In some embodiments, the pharmaceutical formulation is suitable for an intracerebroventricular or intrathecal injection.

[0510] In some embodiments, the pharmaceutical formulation is suitable for oral, rectal, intranasal, intradermal, subcutaneous, intrathecal, intracerebroventricular, intraperitoneal, intramuscular, intravitreal, intravenous, intracranial, intrabucal, or sublingual administration. In some embodiments, the pharmaceutical formulation is suitable for intradermal, subcutaneous, intrathecal, intranasal, intracranial, intracerebroventricular, intraperitoneal, intramuscular, intravitreal, or intravenous injection.

[0511] In some embodiments, the pharmaceutical formulation is packaged in a single use vial. In some embodiments, the pharmaceutical formulation is packaged in a multiple use vial.

[0512] Pharmaceutical formulations comprising the agent, e.g., antisense oligonucleotide or antisense oligomer, of the described compositions and for use in any of the described methods can be prepared according to conventional techniques well known in the pharmaceutical industry and described in the published literature. In some embodiments, a pharmaceutical formulation for treating a subject comprises an effective amount of any antisense oligomer as described herein, or a pharmaceutically acceptable salt, solvate, hydrate or ester thereof. In some embodiments, the pharmaceutical composition described herein further comprises a pharmaceutically acceptable excipient, carrier or diluent.

[0513] Such compositions may comprise buffers such as neutral buffered saline, phosphate buffered saline and the like; carbohydrates such as glucose, mannose, sucrose or dextrans, mannitol; proteins; polypeptides or amino acids such as glycine; antioxidants; chelating agents such as EDTA or glutathione; adjuvants (e.g., aluminum hydroxide); and preservatives.

[0514] A pharmaceutical composition used in the therapeutic methods of the invention is formulated to be compatible with its intended route of administration.

[0515] The terms “pharmaceutical composition” and “pharmaceutical formulation” (or “formulation”) are used interchangeably and denote a mixture or solution comprising a therapeutically effective amount of an active pharmaceutical ingredient together with one or more pharmaceutically acceptable excipients to be administered to a subject, e.g., a human in need thereof.

[0516] In some embodiments, the compositions are formulated into any of many possible dosage forms such as, but not limited to, solutions, liquids, tablets, capsules, gel capsules, liquid syrups, soft gels, suppositories, and enemas. In some embodiments, the compositions are formulated as suspensions in aqueous, non-aqueous or mixed media. Aqueous suspensions may further contain substances that increase the viscosity of the suspension including, for example, sodium carboxymethylcellulose, sorbitol and/or dextran. The suspension may also contain stabilizers. In some embodiments, a pharmaceutical formulation or composition of the present invention includes, but is not limited to, a solution, emulsion, microemulsion, foam or liposome-containing formulation (e.g., cationic or noncationic liposomes).

[0517] The pharmaceutical composition or formulation described herein may comprise one or more penetration enhancers, carriers, excipients or other active or inactive ingredients as appropriate and well known to those of skill in the art or described in the published literature. In embodiments, liposomes also include sterically stabilized liposomes, e.g., liposomes comprising one or more specialized lipids. These specialized lipids result in liposomes with enhanced circulation lifetimes. In embodiments, a sterically stabilized liposome comprises one or more glycolipids or is derivatized with one or more hydrophilic polymers, such as a polyethylene glycol (PEG) moiety. In embodiments, a surfactant is included in the pharmaceutical formulation or compositions. The use of surfactants in drug products, formulations and emulsions is well known in the art. In embodiments, the present invention employs a penetration enhancer to effect the efficient delivery of the antisense oligonucleotide or antisense oligomer, e.g., to aid diffusion across cell membranes and/or enhance the permeability of a lipophilic drug. In embodiments, the penetration enhancers are a surfactant, fatty acid, bile salt, chelating agent, or non-chelating nonsurfactant.

[0518] In embodiments, the pharmaceutical formulation comprises multiple antisense oligonucleotides or antisense oligomers. In embodiments, the antisense oligonucleotide or antisense oligomer is administered in combination with another drug or therapeutic agent.

[0519] Pharmaceutical compositions suitable for injectable use include sterile aqueous solutions (where water soluble) or dispersions and sterile powders for the extemporaneous preparation of sterile injectable solutions or dispersion. Solutions or suspensions used for parenteral, intranasal, intradermal, or subcutaneous application can include the following components: a sterile diluent such as water for injection, saline solution, fixed oils, polyethylene glycols, glycerin, propylene glycol or other synthetic solvents; antibacterial agents such as benzyl alcohol or methyl parabens; antioxidants such as ascorbic acid or sodium bisulfite; chelating agents such as ethylenediaminetetraacetic acid; buffers such as acetates, citrates or phosphates and agents for the adjustment of tonicity such as sodium chloride or dextrose. For example, depending on the injection site, the vehicle may contain water, synthetic or vegetable oil, and/or organic co-solvents. In certain instances, such as with lyophilized product or a concentrate, the parenteral formulation would be reconstituted or diluted prior to administration. pH can be adjusted with acids or bases, such as hydrochloric acid or sodium hydroxide. Depot formulations, providing controlled or sustained release of an invention composition, may include injectable suspensions of nano/micro particles or nano/micro or non-micronized crystals.

[0520] For intravenous administration, suitable carriers include physiological saline, bacteriostatic water, Cremophor EL™ (BASF, Parsippany, N.J.) or phosphate buffered saline (PBS). In all cases, the composition must be sterile and should be fluid to the extent that easy syringability exists. It must be stable under the conditions of manufacture and storage and must be preserved against the contaminating action of microorganisms such as bacteria and fungi. The carrier can be a solvent or dispersion medium containing, for example, water, ethanol, poly(ol) (for example, glycerol, propylene glycol, and liquid polyetheylene glycol, and the like), and suitable mixtures thereof. The proper fluidity can be maintained, for example, by the use of a coating such as lecithin, by the maintenance of the required particle size in the case of dispersion and by the use of surfactants.

[0521] Sterile injectable solutions can be prepared by incorporating the composition in the required amount in an appropriate solvent with one or a com-bination of ingredients enumerated above, as required, followed by filtered sterilization. Prevention of the action of micro-organisms can be achieved by various antibacterial and antifungal agents, for example, parabens, chlorobutanol, phenol, ascorbic acid, thimerosal, and the like.

[0522] Generally, dispersions are prepared by incorporating the active composition into a sterile vehicle which contains a basic dispersion medium and the required other ingredients from those enumerated above. In the case of sterile powders for the preparation of sterile injectable solutions, the preferred methods of preparation are vacuum drying and freeze-drying which yields a powder of the active ingredient plus any additional desired ingredient from a previously sterile-filtered solution thereof. In many cases, it will be preferable to include isotonic agents, for example, sugars, polyalcohols such as manitol, sorbitol, and sodium chloride in the composition. Prolonged absorption of the injectable compositions can be brought about by including in the composition an agent which delays absorption, for example, aluminum monostearate and gelatin. The parenteral preparation can be enclosed in ampoules, disposable syringes or multiple dose vials made of glass or plastic.

[0523] For oral administration, the compositions can be formulated in liquid or solid dosage forms and as instant or controlled/sustained release formulations. Suitable dosage forms for oral ingestion by a subject include powders, tablets, pills, granules, dragees, hard and soft shell capsules, liquids, gels, syrups, slurries, suspensions, emulsions and the like. Oral compositions generally include an inert diluent or an edible carrier. They can be enclosed in gelatin capsules or compressed into tablets. For the purpose of oral therapeutic administration, the active agent can be incorporated with excipients and used in the form of tablets, troches, or capsules. Oral compositions can also be prepared using a fluid carrier for use as a mouthwash, wherein the agent in the fluid carrier is applied orally and swished and expectorated or swallowed. Pharmaceutically compatible binding agents, and/or adjuvant materials can be included as part of the composition. The tablets, granules, pills, capsules, troches and the like can contain any of the following ingredients, or compounds of a similar nature: a binder such as micro-crystalline cellulose, gum tragacanth or gelatin; an excipient such as starch or lactose; dissolution retardant; anti-adherents; cationic exchange resin; wetting agents; antioxidants; preservatives; a disintegrating agent such as alginic acid, Primogel, or corn starch; a lubricant such as magnesium stearate or Sterotes; a glidant such as colloidal silicon dioxide; a preservative; a colorant; a sweetening agent such as sugars such as dextrose, sucrose or saccharin; or a flavoring agent such as peppermint, methyl salicylate, or orange flavoring, each of these being synthetic and/or natural.

[0524] For administration by inhalation, e.g., intranasal administration, the compositions are delivered in the form of an aerosol spray from pressured container or dispenser which contains a suitable propellant, e.g., a gas such as carbon dioxide, or a nebulizer. Systemic administration can also be by transmucosal or trans-dermal means. For transmucosal or transdermal administration, penetrants appropriate to the barrier to be permeated are used in the formulation. Such penetrants are generally known in the art, and include, for example, for transmucosal administration, detergents, bile salts, and fusidic acid derivatives. Transmucosal administration can be accomplished through the use of nasal sprays or suppositories. For transdermal administration, the active agents are formulated into ointments, salves, gels, or creams, emulsion, a solution, a suspension, or a foam, as generally known in the art. The penetration of the drug into the skin and underlying tissues can be regulated, for example, using penetration enhancers; the appropriate choice and combination of lipophilic, hydrophilic, and amphiphilic excipients, including water, organic solvents, waxes, oils, synthetic and natural polymers, surfactants, emulsifiers; by pH adjustments; use of complexing agents and other techniques, such as iontophoresis, may be used to regulate skin penetration of the active ingredient.

[0525] The compositions may also be formulated in rectal compositions, such as suppositories (e.g., with conventional suppository bases such as cocoa butter and other glycerides) or retention enemas.

[0526] Examples of pharmaceutically or physiologically acceptable carriers, diluents or excipients include, but are not limited to, antifoaming agents, antioxidants, binders, carriers or carrier materials, dispersing agents, viscosity modulating agents, diluents, filling agents, lubricants, glidants, plasticizers, solubilizers, stabilizers, suspending agents, surfactants, viscosity enhancing agents, and wetting agents.

[0527] The separate components of the compositions of the invention may be preblended or each component may be added separately to the same environment according to a predetermined dosage for the purpose of achieving the desired concentration level of the treatment components and so long as the components eventually come into intimate admixture with each other. Further, the invention may be administered or delivered on a continuous or intermittent basis.

[0528] It is especially advantageous to formulate oral or parenteral compositions in dosage unit form for ease of administration and uniformity of dosage. Dosage unit form as used herein refers to physically discrete units suited as unitary dosages for the subject to be treated; each unit containing a predetermined quantity of active compound calculated to produce the desired therapeutic effect in association with the required pharmaceutical carrier. The specification for the dosage unit forms of the invention are dictated by and directly dependent on the unique characteristics of the compositions and the particular therapeutic effect to be achieved, and the limitations inherent in the art of compounding such an agent for the treatment of subjects.

[0529] In some embodiments, provided herein is a method of producing the pharmaceutical formulation as described herein.

### Combination Therapies

[0530] In some embodiments, the ASOs disclosed in the present disclosure can be used in combination with one or more additional therapeutic agents. In some embodiments, the one or more additional therapeutic agents can comprise a small molecule. For example, the one or more additional therapeutic agents can comprise a small molecule described in WO2016128343A1, WO2017053982A1, WO2016196386A1, WO201428459A1, WO201524876A2, WO2013119916A2, and WO2014209841A2, which are incorporated by reference herein in their entirety. In some embodiments, the one or more additional therapeutic agents comprise an ASO that can be used to correct intron retention. In some embodiments, the one or more other agents are selected from the ASOs listed in Table 8a or Table 8b.

### Treatment of Subjects

[0531] Any of the compositions provided herein may be administered to an individual. “Individual” may be used interchangeably with “subject” or “patient.” An individual may be a mammal, for example a human or animal such as a non-human primate, a rodent, a rabbit, a rat, a mouse, a horse, a donkey, a goat, a cat, a dog, a cow, a pig, or a sheep. In embodiments, the individual is a human. In embodiments, the individual is a fetus, an embryo, or a child. In other embodiments, the individual may be another eukaryotic organism, such as a plant. In some embodiments, the compositions provided herein are administered to a cell ex vivo.

[0532] In some embodiments, the compositions provided herein are administered to an individual as a method of treating a disease or disorder. In some embodiments, the individual has a genetic disease, such as any of the diseases described herein. In some embodiments, the individual is at risk of having a disease, such as any of the diseases described herein. In some embodiments, the individual is at increased risk of having a disease or disorder caused by insufficient amount of a protein or insufficient activity of a protein. If an individual is “at an increased risk” of having a disease or disorder caused insufficient amount of a protein or insufficient activity of a protein, the method involves preventative or prophylactic treatment. For example, an individual may be at an increased risk of having such a disease or disorder because of family history of the disease. Typically, individuals at an increased risk of having such a disease or disorder benefit from prophylactic treatment (e.g., by preventing or delaying the onset or progression of the disease or disorder). In embodiments, a fetus is treated in utero, e.g., by administering the ASO composition to the fetus directly or indirectly (e.g., via the mother).

[0533] Suitable routes for administration of ASOs of the present disclosure may vary depending on cell type to which delivery of the ASOs is desired. Multiple tissues and organs are affected by Dravet syndrome; Epilepsy, generalized, with febrile seizures plus, type 2; Febrile seizures, familial, 3A; Migraine, familial hemiplegic, 3; Autism; Epileptic encephalopathy, early infantile, 13; Sick sinus syndrome 1; Alzheimer's disease or SUDEP, with the brain being the most significantly affected tissue. The ASOs of the present disclosure may be administered to patients parenterally, for example, by intrathecal injection, intracerebroventricular injection, intraperitoneal injection, intramuscular injection, subcutaneous injection, intravitreal injection, or intravenous injection.

### Mode of Action

[0534] In some embodiments, the reduced expression or function of Na_{V}1.1 protein is associated with an altered splicing of a non-sense mediated RNA decay-inducing exon (NMD exon) from a pre-mRNA that contains the NMD exon and that encodes Na_{V}1.1 protein. For example, the reduced expression or function of Na_{V}1.1 protein can be associated with a reduced splicing of a non-sense mediated RNA decay-inducing exon (NMD exon) from a pre-mRNA that contains the NMD exon and that encodes Na_{V}1.1 protein.

[0535] In some embodiments, the ASO as described herein promotes exclusion of the NMD exon from a pre-mRNA that contains the NMD exon and that encodes Na_{V}1.1 protein.

[0536] In some embodiments, the ASO as described herein promotes exclusion of the NMD exon from a pre-mRNA that contains the NMD exon and that encodes Na_{V}1.1 protein by at least 5%, at least 10%, at least 20%, at least 30%, at least 40%, at least 50%, at least 60%, at least 70%, at least 80%, at least 90%, at least 100%, at least 200%, at least 300%, at least 400%, at least 500%, at least 600%, at least 700%, at least 800%, at least 900%, at least 1000%, at least 2000%, at least 3000%, at least 4000%, at least 5000%, at least 6000%, at least 7000%, at least 8000%, at least 9000%, at least 10000%, at least 20000%, at least 30000%, at least 40000%, at least 50000%, at least 60000%, at least 70000%, at least 80000%, at least 90000%, or at least 100000% as compared to an untreated control cell, tissue or subject, or compared to the corresponding activity in the same type of cell, tissue or subject before treatment with the ASO as described herein as measured by any standard technique. In some embodiments, the ASO as described herein promotes exclusion of the NMD exon a pre-mRNA that contains the NMD exon and that encodes Na_{V}1.1 protein by at least 2 fold, at least 3 fold, at least 4 fold, at least 5 fold, at least 10 fold, at least 20 fold, at least 25 fold, at least 30 fold, at least 40 fold, at least 50 fold, at least 60 fold, at least 70 fold, at least 80 fold, at least 90 fold, at least 100 fold, at least 200 fold, at least 300 fold, at least 400 fold, at least 500 fold, at least 600 fold, at least 700 fold, at least 800 fold, at least 900 fold, at least 1000 fold, at least 2000 fold, at least 3000 fold, at least 4000 fold, at least 5000 fold, at least 6000 fold, at least 7000 fold, at least 8000 fold, at least 9000 fold, or at least 10000 fold as compared to an untreated control cell, tissue or subject, or compared to the corresponding activity in the same type of cell, tissue or subject before treatment with the ASO as described herein as measured by any standard technique.

[0537] In some embodiments, the ASO as described herein binds to a targeted portion of a pre-mRNA that contains a non-sense mediated RNA decay-inducing exon and that encodes Na_{V}1.1 protein.

[0538] In some embodiments, the ASO as described herein promotes exclusion of a non-sense mediated mRNA decay-inducing exon (NMD exon) from a pre-mRNA that contains the NMD exon and that encodes Na_{V}1.1 protein.

[0539] In some embodiments, the ASO as described herein promotes exclusion of an NMD exon from a pre-mRNA that contains the NMD exon and that encodes Na_{V}1.1 protein by at least 5%, at least 10%, at least 20%, at least 30%, at least 40%, at least 50%, at least 60%, at least 70%, at least 80%, at least 90%, at least 100%, at least 200%, at least 300%, at least 400%, at least 500%, at least 600%, at least 700%, at least 800%, at least 900%, at least 1000%, at least 2000%, at least 3000%, at least 4000%, at least 5000%, at least 6000%, at least 7000%, at least 8000%, at least 9000%, at least 10000%, at least 20000%, at least 30000%, at least 40000%, at least 50000%, at least 60000%, at least 70000%, at least 80000%, at least 90000%, or at least 100000% as compared to an untreated control cell, tissue or subject, or compared to the corresponding activity in the same type of cell, tissue or subject before treatment with the ASO as described herein as measured by any standard technique. In some embodiments, the ASO as described herein promotes exclusion of an NMD exon from a pre-mRNA that contains the NMD exon and that encodes Na_{V}1.1 protein by at least 2 fold, at least 3 fold, at least 4 fold, at least 5 fold, at least 10 fold, at least 20 fold, at least 25 fold, at least 30 fold, at least 40 fold, at least 50 fold, at least 60 fold, at least 70 fold, at least 80 fold, at least 90 fold, at least 100 fold, at least 200 fold, at least 300 fold, at least 400 fold, at least 500 fold, at least 600 fold, at least 700 fold, at least 800 fold, at least 900 fold, at least 1000 fold, at least 2000 fold, at least 3000 fold, at least 4000 fold, at least 5000 fold, at least 6000 fold, at least 7000 fold, at least 8000 fold, at least 9000 fold, or at least 10000 fold as compared to an untreated control cell, tissue or subject, or compared to the corresponding activity in the same type of cell, tissue or subject before treatment with the ASO as described herein as measured by any standard technique.

[0540] In some embodiments, the ASO as described herein increases a level of processed mRNA encoding the Na_{V}1.1 protein in a cell having a pre-mRNA that contains an NMD exon and that encodes Na_{V}1.1 protein when the ASO as described herein is introduced into the cell.

[0541] In some embodiments, when the ASO as described herein is introduced into the cell, the ASO as described herein increases a level of processed mRNA encoding the Na_{V}1.1 protein in a cell having a pre-mRNA that contains an NMD exon and that encodes Na_{V}1.1 protein by at least 5%, at least 10%, at least 20%, at least 30%, at least 40%, at least 50%, at least 60%, at least 70%, at least 80%, at least 90%, at least 100%, at least 200%, at least 300%, at least 400%, at least 500%, at least 600%, at least 700%, at least 800%, at least 900%, at least 1000%, at least 2000%, at least 3000%, at least 4000%, at least 5000%, at least 6000%, at least 7000%, at least 8000%, at least 9000%, at least 10000%, at least 20000%, at least 30000%, at least 40000%, at least 50000%, at least 60000%, at least 70000%, at least 80000%, at least 90000%, or at least 100000% as compared to an untreated control cell, tissue or subject, or compared to the corresponding activity in the same type of cell, tissue or subject before treatment with the ASO as described herein as measured by any standard technique. In some embodiments, when the ASO as described herein is introduced into the cell, the ASO as described herein increases a level of processed mRNA encoding the Na_{V}1.1 protein in a cell having a pre-mRNA that contains an NMD exon and that encodes Na_{V}1.1 protein by at least 2 fold, at least 3 fold, at least 4 fold, at least 5 fold, at least 10 fold, at least 20 fold, at least 25 fold, at least 30 fold, at least 40 fold, at least 50 fold, at least 60 fold, at least 70 fold, at least 80 fold, at least 90 fold, at least 100 fold, at least 200 fold, at least 300 fold, at least 400 fold, at least 500 fold, at least 600 fold, at least 700 fold, at least 800 fold, at least 900 fold, at least 1000 fold, at least 2000 fold, at least 3000 fold, at least 4000 fold, at least 5000 fold, at least 6000 fold, at least 7000 fold, at least 8000 fold, at least 9000 fold, or at least 10000 fold as compared to an untreated control cell, tissue or subject, or compared to the corresponding activity in the same type of cell, tissue or subject before treatment with the ASO as described herein as measured by any standard technique.

[0542] In some embodiments, the ASO as described herein increases a level of the N_{V}1.1 protein in a cell having a pre-mRNA that contains an NMD exon and that encodes Na_{V}1.1 protein when the ASO as described herein is introduced into the cell.

[0543] In some embodiments, when the ASO as described herein is introduced into the cell, the ASO as described herein increases a level of the Na_{V}1.1 protein in a cell having a pre-mRNA that contains an NMD exon and that encodes Na_{V}1.1 protein by at least 5%, at least 10%, at least 20%, at least 30%, at least 40%, at least 50%, at least 60%, at least 70%, at least 80%, at least 90%, at least 100%, at least 200%, at least 300%, at least 400%, at least 500%, at least 600%, at least 700%, at least 800%, at least 900%, at least 1000%, at least 2000%, at least 3000%, at least 4000%, at least 5000%, at least 6000%, at least 7000%, at least 8000%, at least 9000%, at least 10000%, at least 20000%, at least 30000%, at least 40000%, at least 50000%, at least 60000%, at least 70000%, at least 80000%, at least 90000%, or at least 100000% as compared to an untreated control cell, tissue or subject, or compared to the corresponding activity in the same type of cell, tissue or subject before treatment with the ASO as described herein as measured by any standard technique. In some embodiments, when the ASO as described herein is introduced into the cell, the ASO as described herein increases a level of the Na_{V}1.1 protein in a cell having a pre-mRNA that contains an NMD exon and that encodes Na_{V}1.1 protein by at least 2 fold, at least 3 fold, at least 4 fold, at least 5 fold, at least 10 fold, at least 20 fold, at least 25 fold, at least 30 fold, at least 40 fold, at least 50 fold, at least 60 fold, at least 70 fold, at least 80 fold, at least 90 fold, at least 100 fold, at least 200 fold, at least 300 fold, at least 400 fold, at least 500 fold, at least 600 fold, at least 700 fold, at least 800 fold, at least 900 fold, at least 1000 fold, at least 2000 fold, at least 3000 fold, at least 4000 fold, at least 5000 fold, at least 6000 fold, at least 7000 fold, at least 8000 fold, at least 9000 fold, or at least 10000 fold as compared to an untreated control cell, tissue or subject, or compared to the corresponding activity in the same type of cell, tissue or subject before treatment with the ASO as described herein as measured by any standard technique.

[0544] In some embodiments, the targeted portion is within an intron sequence flanking the NMD exon.

[0545] In some embodiments, the targeted portion comprises at least one nucleotide of the NMD exon.

[0546] In some embodiments, the targeted portion comprises at least 1, 2, 3, 4, 5, 6, 7, 8, 9, 10, 11, 12, 13, 14, 15, 16, 17, 18, 19, 20, 21, 22, 23, 24, 25, 26, 27, 28, 29, 30, 31, 32, 33, 34, 35, 36, 37, 38, 39, 40, 41, 42, 43, 44, 45, 46, 47, 48, or 49 nucleotide of the NMD exon. In some embodiments, the targeted portion comprises at most 1, 2, 3, 4, 5, 6, 7, 8, 9, 10, 11, 12, 13, 14, 15, 16, 17, 18, 19, 20, 21, 22, 23, 24, 25, 26, 27, 28, 29, 30, 31, 32, 33, 34, 35, 36, 37, 38, 39, 40, 41, 42, 43, 44, 45, 46, 47, 48, or 49 nucleotide of the NMD exon.

[0547] In some embodiments, the targeted portion is within the NMD exon.

[0548] In some embodiments, the NMD exon comprises a sequence with at least 80%, at least 90%, or 100% sequence identity to a sequence selected from the group consisting of the sequences listed in Table 1 or Table 2. In some embodiments, the NMD exon comprises a sequence selected from the group consisting of the sequences listed in Table 1 or Table 2. In some embodiments, the pre-mRNA comprises a sequence with at least about 80%, 85%, 90%, 95%, 97%, or 100% sequence identity to a sequence selected from the group consisting of the sequences listed in Table 1 or Table 2. In some embodiments, the pre-mRNA is encoded by a genetic sequence with at least about 80%, 85%, 90%, 95%, 97%, or 100% sequence identity to a sequence selected from the group consisting of the sequences listed in Table 1 or Table 2.

Splicing and Nonsense-Mediated mRNA Decay

[0549] Intervening sequences or introns are removed by a large and highly dynamic RNA-protein complex termed the spliceosome, which orchestrates complex interactions between primary transcripts, small nuclear RNAs (snRNAs) and a large number of proteins. Spliceosomes assemble ad hoc on each intron in an ordered manner, starting with recognition of the 5′ splice site (5′ss) by U1 snRNA or the 3′ splice site (3′ss) by the U2 pathway, which involves binding of the U2 auxiliary factor (U2AF) to the 3′ss region to facilitate U2 binding to the branch point sequence (BPS). U2AF is a stable heterodimer composed of a U2AF2-encoded 65-kD subunit (U2AF65), which binds the polypyrimidine tract (PPT), and a U2AF1-encoded 35-kD subunit (U2AF35), which interacts with highly conserved AG dinucleotides at 3′ss and stabilizes U2AF65 binding. In addition to the BPS/PPT unit and 3′ss/5′ss, accurate splicing requires auxiliary sequences or structures that activate or repress splice site recognition, known as intronic or exonic splicing enhancers or silencers. These elements allow genuine splice sites to be recognized among a vast excess of cryptic or pseudo-sites in the genome of higher eukaryotes, which have the same sequences but outnumber authentic sites by an order of magnitude. Although they often have a regulatory function, the exact mechanisms of their activation or repression are poorly understood.

[0550] The decision of whether to splice or not to splice can be typically modeled as a stochastic rather than deterministic process, such that even the most defined splicing signals can sometimes splice incorrectly. However, under normal conditions, pre-mRNA splicing proceeds at surprisingly high fidelity. This is attributed in part to the activity of adjacent cis-acting auxiliary exonic and intronic splicing regulatory elements (ESRs or ISRs). Typically, these functional elements are classified as either exonic or intronic splicing enhancers (ESEs or ISEs) or silencers (ESSs or ISSs) based on their ability to stimulate or inhibit splicing, respectively. Although there is now evidence that some auxiliary cis-acting elements may act by influencing the kinetics of spliceosome assembly, such as the arrangement of the complex between U1 snRNP and the 5′ss, it seems very likely that many elements function in concert with trans-acting RNA-binding proteins (RBPs). For example, the serine- and arginine-rich family of RBPs (SR proteins) is a conserved family of proteins that have a key role in defining exons. SR proteins promote exon recognition by recruiting components of the pre-spliceosome to adjacent splice sites or by antagonizing the effects of ESSs in the vicinity. The repressive effects of ESSs can be mediated by members of the heterogeneous nuclear ribonucleoprotein (hnRNP) family and can alter recruitment of core splicing factors to adjacent splice sites. In addition to their roles in splicing regulation, silencer elements are suggested to have a role in repression of pseudo-exons, sets of decoy intronic splice sites with the typical spacing of an exon but without a functional open reading frame. ESEs and ESSs, in cooperation with their cognate trans-acting RBPs, represent important components in a set of splicing controls that specify how, where and when mRNAs are assembled from their precursors.

[0551] The sequences marking the exon-intron boundaries are degenerate signals of varying strengths that can occur at high frequency within human genes. In multi-exon genes, different pairs of splice sites can be linked together in many different combinations, creating a diverse array of transcripts from a single gene. This is commonly referred to as alternative pre-mRNA splicing. Although most mRNA isoforms produced by alternative splicing can be exported from the nucleus and translated into functional polypeptides, different mRNA isoforms from a single gene can vary greatly in their translation efficiency. Those mRNA isoforms with premature termination codons (PTCs) at least 50 bp upstream of an exon junction complex are likely to be targeted for degradation by the nonsense-mediated mRNA decay (NMD) pathway. Mutations in traditional (BPS/PPT/3′ss/5′ss) and auxiliary splicing motifs can cause aberrant splicing, such as exon skipping or cryptic (or pseudo-) exon inclusion or splice-site activation, and contribute significantly to human morbidity and mortality. Both aberrant and alternative splicing patterns can be influenced by natural DNA variants in exons and introns.

[0552] Given that exon-intron boundaries can occur at any of the three positions of a codon, it is clear that only a subset of alternative splicing events can maintain the canonical open reading frame. For example, only exons that are evenly divisible by 3 can be skipped or included in the mRNA without any alteration of reading frame. Splicing events that do not have compatible phases will induce a frame-shift. Unless reversed by downstream events, frame-shifts can certainly lead to one or more PTCs, probably resulting in subsequent degradation by NMD. NMD is a translation-coupled mechanism that eliminates mRNAs containing PTCs. NMD can function as a surveillance pathway that exists in all eukaryotes. NMD can reduce errors in gene expression by eliminating mRNA transcripts that contain premature stop codons. Translation of these aberrant mRNAs could, in some cases, lead to deleterious gain-of-function or dominant-negative activity of the resulting proteins. NMD targets not only transcripts with PTCs but also a broad array of mRNA isoforms expressed from many endogenous genes, suggesting that NMD is a master regulator that drives both fine and coarse adjustments in steady-state RNA levels in the cell.

[0553] An NMD-inducing exon (NIE) is an exon or a pseudo-exon that is a region within an intron and can activate the NMD pathway if included in a mature RNA transcript. In the constitutive splicing events, the intron containing an NIE is usually spliced out, but the intron or a portion thereof (e.g. NIE) can be retained during alternative or aberrant splicing events. Mature mRNA transcripts containing such an NIE can be non-productive due to frame shift which induce NMD pathway. Inclusion of a NIE in mature RNA transcripts can downregulate gene expression. mRNA transcripts, such as a pre-mRNA transcript, containing an NIE can be referred as “NIE containing mRNA” or “NMD exon mRNA” in the current disclosure.

[0554] Cryptic (or pseudo-splice sites) have the same splicing recognition sequences as genuine splice sites but are not used in the splicing reactions. They outnumber genuine splice sites in the human genome by an order of a magnitude and are normally repressed by thus far poorly understood molecular mechanisms. Cryptic 5′ splice sites have the consensus NNN/GUNNNN or NNN/GCNNNN where N is any nucleotide and/is the exon-intron boundary. Cryptic 3′ splice sites have the consensus NAG/N. Their activation is positively influenced by surrounding nucleotides that make them more similar to the optimal consensus of authentic splice sites, namely MAG/GURAGU and YAG/G, respectively, where M is C or A, R is G or A, and Y is C or U.

[0555] Splice sites and their regulatory sequences can be readily identified by a skilled person using suitable algorithms publicly available, listed for example in Kralovicova, J. and Vorechovsky, I. (2007) Global control of aberrant splice site activation by auxiliary splicing sequences: evidence for a gradient in exon and intron definition. Nucleic Acids Res., 35, 6399-6413, (http://www.ncbi.nlm.nih.gov/pmc/articles/PMC2095810/pdf/gkm680.pdf)

[0556] The cryptic splice sites or splicing regulatory sequences may compete for RNA-binding proteins such as U2AF with a splice site of the NIE. In one embodiment, an agent may bind to the cryptic splice site or splicing regulatory sequences to prevent the binding of RNA-binding proteins and thereby favoring utilization of the NIE splice sites.

[0557] In one embodiment, the cryptic splice site may not comprise the 5′ or 3′ splice site of the NIE. The cryptic splice site may be at least 10 nucleotides upstream of the NIE 5′ splice site. The cryptic splice site may be at least 20 nucleotides upstream of the NIE 5′ splice site. The cryptic splice site may be at least 50 nucleotides upstream of the NIE 5′ splice site. The cryptic splice site may be at least 100 nucleotides upstream of the NIE 5′ splice site. The cryptic splice site may be at least 200 nucleotides upstream of the NIE 5′ splice site.

[0558] The cryptic splice site may be at least 10 nucleotides downstream of the NIE 3′ splice site. The cryptic splice site may be at least 20 nucleotides downstream of the NIE 3′ splice site. The cryptic splice site may be at least 50 nucleotides downstream of the NIE 3′ splice site. The cryptic splice site may be at least 100 nucleotides downstream of the NIE 3′ splice site. The cryptic splice site may be at least 200 nucleotides downstream of the NIE 3′ splice site.

[0559] In some embodiments, the methods of the present disclosure exploit the presence of NIE in the pre-mRNA transcribed from the SCN1A gene. Splicing of the identified SCN1A NIE pre-mRNA species to produce functional mature Scn1a mRNA can be induced using a therapeutic agent such as an ASO that stimulates exon skipping of an NIE. Induction of exon skipping can result in inhibition of an NMD pathway. The resulting mature Scn1a mRNA can be translated normally without activating NMD pathway, thereby increasing the amount of Na_{V}1.1 (also termed “Na_{V}1.1 protein” herein) in the patient's cells and alleviating symptoms of a condition associated with SCN1A deficiency, such as Dravet Syndrome (DS); Epilepsy, generalized, with febrile seizures plus, type 2; Febrile seizures, familial, 3A; Autism; Epileptic encephalopathy, early infantile, 13; Sick sinus syndrome 1; Alzheimer's disease; or SUDEP.

[0560] Where reference is made to reducing NIE inclusion in the mature mRNA, the reduction may be complete, e.g., 100%, or may be partial. The reduction may be clinically significant. The reduction/correction may be relative to the level of NIE inclusion in the subject without treatment, or relative to the amount of NIE inclusion in a population of similar subjects. The reduction/correction may be at least 10% less NIE inclusion relative to the average subject, or the subject prior to treatment. The reduction may be at least 20% less NIE inclusion relative to an average subject, or the subject prior to treatment. The reduction may be at least 40% less NIE inclusion relative to an average subject, or the subject prior to treatment. The reduction may be at least 50% less NIE inclusion relative to an average subject, or the subject prior to treatment. The reduction may be at least 60% less NIE inclusion relative to an average subject, or the subject prior to treatment. The reduction may be at least 80% less NIE inclusion relative to an average subject, or the subject prior to treatment. The reduction may be at least 90% less NIE inclusion relative to an average subject, or the subject prior to treatment.

[0561] Where reference is made to increasing active-Na_{V}1.1 protein levels, the increase may be clinically significant. The increase may be relative to the level of active-Na_{V}1.1 protein in the subject without treatment, or relative to the amount of active-Na_{V}1.1 protein in a population of similar subjects. The increase may be at least 10% more active-Na_{V}1.1 protein relative to the average subject, or the subject prior to treatment. The increase may be at least 20% more active-Na_{V}1.1 protein relative to the average subject, or the subject prior to treatment. The increase may be at least 40% more active-Na_{V}1.1 protein relative to the average subject, or the subject prior to treatment. The increase may be at least 50% more active-Na_{V}1.1 protein relative to the average subject, or the subject prior to treatment. The increase may be at least 80% more active-Na_{V}1.1 protein relative to the average subject, or the subject prior to treatment. The increase may be at least 100% more active-Na_{V}1.1 protein relative to the average subject, or the subject prior to treatment. The increase may be at least 200% more active-Na_{V}1.1 protein relative to the average subject, or the subject prior to treatment. The increase may be at least 500% more active-Na_{V}1.1 protein relative to the average subject, or the subject prior to treatment.

### Exon Inclusion

[0562] As used herein, a “NIE containing pre-mRNA” is a pre-mRNA transcript that contains at least one pseudo-exon. Alternative or aberrant splicing can result in inclusion of the at least one pseudo-exon in the mature mRNA transcripts. The terms “mature mRNA,” and “fully-spliced mRNA,” are used interchangeably here-in to describe a fully processed mRNA. Inclusion of the at least one pseudo-exon can be non-productive mRNA and lead to NMD of the mature mRNA. NIE containing mature mRNA may sometimes lead to aberrant protein expression.

[0563] One of skill in the art also can determine the sequences of flanking exons in any SCN1A isoform for targeting using the methods of the disclosure, based on an intron sequence provided herein or using the intron number provided in reference to the mRNA sequence at NM_006920, NM_001202435, NM_001165964, or NM_001165963.

[0564] In some embodiments, the methods and compositions of the present disclosure are used to modulate, e.g., increase or decrease, the expression of SCN1A by inducing or inhibiting exon skipping of a pseudo-exon of an SCN1A NIE containing pre-mRNA. In some embodiments, the pseudo-exon is a sequence within any of introns 1-25. In some embodiments, the pseudo-exon is a sequence within any of introns 2, 4, 6, 13, 14, 15, 16, 17, 18, 20, 21, 22, 23, 24, and 25. In some embodiments, the pseudo-exon is a sequence within any of introns 15, 18, and 19. In some embodiments, the pseudo-exon can be any SCN1A intron or a portion thereof. In some embodiments, the pseudo-exon is within intron 20. The SCN1A intron numbering used herein corresponds to the mRNA sequence at NM_006920. It is understood that the intron numbering may change in reference to a different SCN1A isoform sequence.

[0565] In some embodiments, the included pseudo-exon is the most abundant pseudo-exon in a population of NIE containing pre-mRNAs transcribed from the gene encoding the target protein in a cell. In some embodiments, the included pseudo-exon is the most abundant pseudo-exon in a population of NIE containing pre-mRNAs transcribed from the gene encoding the target protein in a cell, where-in the population of NIE containing pre-mRNAs comprises two or more included pseudo-exons. In some embodiments, an antisense oligomer targeted to the most abundant pseudo-exon in the population of NIE containing pre-mRNAs encoding the target protein induces exon skipping of one or two or more pseudo-exons in the population, including the pseudo-exon to which the antisense oligomer is targeted or binds. In embodiments, the targeted region is in a pseudo-exon that is the most abundant pseudo-exon in a NIE containing pre-mRNA encoding the Na_{V}1.1 protein.

[0566] The degree of exon inclusion can be expressed as percent exon inclusion, e.g., the percentage of transcripts in which a given pseudo-exon is included. In brief, percent exon inclusion can be calculated as the percentage of the amount of RNA transcripts with the exon inclusion, over the sum of the average of the amount of RNA transcripts with exon inclusion plus the average of the amount of RNA transcripts with exon exclusion.

[0567] In some embodiments, an included pseudo-exon is an exon that is identified as an included pseudo-exon based on a determination of at least about 5%, at least about 10%, at least about 15%, at least about 20%, at least about 25%, at least about 30%, at least about 35%, at least about 40%, at least about 45%, or at least about 50%, inclusion. In embodiments, a included pseudo-exon is an exon that is identified as a included pseudo-exon based on a determination of about 5% to about 100%, about 5% to about 95%, about 5% to about 90%, about 5% to about 85%, about 5% to about 80%, about 5% to about 75%, about 5% to about 70%, about 5% to about 65%, about 5% to about 60%, about 5% to about 55%, about 5% to about 50%, about 5% to about 45%, about 5% to about 40%, about 5% to about 35%, about 5% to about 30%, about 5% to about 25%, about 5% to about 20%, about 5% to about 15%, about 10% to about 100%, about 10% to about 95%, about 10% to about 90%, about 10% to about 85%, about 10% to about 80%, about 10% to about 75%, about 10% to about 70%, about 10% to about 65%, about 10% to about 60%, about 10% to about 55%, about 10% to about 50%, about 10% to about 45%, about 10% to about 40%, about 10% to about 35%, about 10% to about 30%, about 10% to about 25%, about 10% to about 20%, about 15% to about 100%, about 15% to about 95%, about 15% to about 90%, about 15% to about 85%, about 15% to about 80%, about 15% to about 75%, about 15% to about 70%, about 15% to about 65%, about 15% to about 60%, about 15% to about 55%, about 15% to about 50%, about 15% to about 45%, about 15% to about 40%, about 15% to about 35%, about 15% to about 30%, about 15% to about 25%, about 20% to about 100%, about 20% to about 95%, about 20% to about 90%, about 20% to about 85%, about 20% to about 80%, about 20% to about 75%, about 20% to about 70%, about 20% to about 65%, about 20% to about 60%, about 20% to about 55%, about 20% to about 50%, about 20% to about 45%, about 20% to about 40%, about 20% to about 35%, about 20% to about 30%, about 25% to about 100%, about 25% to about 95%, about 25% to about 90%, about 25% to about 85%, about 25% to about 80%, about 25% to about 75%, about 25% to about 70%, about 25% to about 65%, about 25% to about 60%, about 25% to about 55%, about 25% to about 50%, about 25% to about 45%, about 25% to about 40%, or about 25% to about 35%, inclusion. ENCODE data (described by, e.g., Tilgner, et al., 2012, “Deep sequencing of subcellular RNA fractions shows splicing to be predominantly co-transcriptional in the human genome but inefficient for lncRNAs,” Genome Research 22(9):1616-25, of which entire content is incorporated herein by reference) can be used to aid in identifying exon inclusion.

[0568] In some embodiments, contacting cells with an ASO that is complementary to a targeted portion of a SCN1A pre-mRNA transcript results in an increase in the amount of Na_{V}1.1 protein produced by at least 10, 20, 30, 40, 50, 60, 80, 100, 150, 200, 250, 300, 350, 400, 450, 500, or 1000%, compared to the amount of the protein produced by a cell in the absence of the ASO/absence of treatment. In some embodiments, the total amount of Na_{V}1.1 protein produced by the cell to which the antisense oligomer is contacted is increased about 1.1 to about 10-fold, about 1.5 to about 10-fold, about 2 to about 10-fold, about 3 to about 10-fold, about 4 to about 10-fold, about 1.1 to about 5-fold, about 1.1 to about 6-fold, about 1.1 to about 7-fold, about 1.1 to about 8-fold, about 1.1 to about 9-fold, about 2 to about 5-fold, about 2 to about 6-fold, about 2 to about 7-fold, about 2 to about 8-fold, about 2 to about 9-fold, about 3 to about 6-fold, about 3 to about 7-fold, about 3 to about 8-fold, about 3 to about 9-fold, about 4 to about 7-fold, about 4 to about 8-fold, about 4 to about 9-fold, at least about 1.1-fold, at least about 1.5-fold, at least about 2-fold, at least about 2.5-fold, at least about 3-fold, at least about 3.5-fold, at least about 4-fold, at least about 5-fold, or at least about 10-fold, compared to the amount of target protein produced by a control compound. A control compound can be, for example, an oligonucleotide that is not complementary to a targeted portion of the pre-mRNA.

[0569] In some embodiments, contacting cells with an ASO that is complementary to a targeted portion of a SCN1A pre-mRNA transcript results in a decrease in the amount of Na_{V}1.1 protein produced by at least 10, 20, 30, 40, 50, 60, 80, 100, 150, 200, 250, 300, 350, 400, 450, 500, or 1000%, compared to the amount of the protein produced by a cell in the absence of the ASO/absence of treatment. In some embodiments, the total amount of Na_{V}1.1 protein produced by the cell to which the antisense oligomer is contacted is decreased about 1.1 to about 10-fold, about 1.5 to about 10-fold, about 2 to about 10-fold, about 3 to about 10-fold, about 4 to about 10-fold, about 1.1 to about 5-fold, about 1.1 to about 6-fold, about 1.1 to about 7-fold, about 1.1 to about 8-fold, about 1.1 to about 9-fold, about 2 to about 5-fold, about 2 to about 6-fold, about 2 to about 7-fold, about 2 to about 8-fold, about 2 to about 9-fold, about 3 to about 6-fold, about 3 to about 7-fold, about 3 to about 8-fold, about 3 to about 9-fold, about 4 to about 7-fold, about 4 to about 8-fold, about 4 to about 9-fold, at least about 1.1-fold, at least about 1.5-fold, at least about 2-fold, at least about 2.5-fold, at least about 3-fold, at least about 3.5-fold, at least about 4-fold, at least about 5-fold, or at least about 10-fold, compared to the amount of target protein produced by a control compound. A control compound can be, for example, an oligonucleotide that is not complementary to a targeted portion of the pre-mRNA.

[0570] In some embodiments, contacting cells with an ASO that is complementary to a targeted portion of a SCN1A pre-mRNA transcript results in an increase in the amount of mRNA encoding SCN1A, including the mature mRNA encoding the target protein. In some embodiments, the amount of mRNA encoding Na_{V}1.1 protein, or the mature mRNA encoding the Na_{V}1.1 protein, is increased by at least 10, 20, 30, 40, 50, 60, 80, 100, 150, 200, 250, 300, 350, 400, 450, 500, or 1000%, compared to the amount of the protein produced by a cell in the absence of the ASO/absence of treatment. In some embodiments, the total amount of the mRNA encoding Na_{V}1.1 protein, or the mature mRNA encoding Na_{V}1.1 protein produced in the cell to which the antisense oligomer is contacted is increased about 1.1 to about 10-fold, about 1.5 to about 10-fold, about 2 to about 10-fold, about 3 to about 10-fold, about 4 to about 10-fold, about 1.1 to about 5-fold, about 1.1 to about 6-fold, about 1.1 to about 7-fold, about 1.1 to about 8-fold, about 1.1 to about 9-fold, about 2 to about 5-fold, about 2 to about 6-fold, about 2 to about 7-fold, about 2 to about 8-fold, about 2 to about 9-fold, about 3 to about 6-fold, about 3 to about 7-fold, about 3 to about 8-fold, about 3 to about 9-fold, about 4 to about 7-fold, about 4 to about 8-fold, about 4 to about 9-fold, at least about 1.1-fold, at least about 1.5-fold, at least about 2-fold, at least about 2.5-fold, at least about 3-fold, at least about 3.5-fold, at least about 4-fold, at least about 5-fold, or at least about 10-fold compared to the amount of mature RNA produced in an untreated cell, e.g., an untreated cell or a cell treated with a control compound. A control compound can be, for example, an oligonucleotide that is not complementary to a targeted portion of the SCN1A NIE containing pre-mRNA.

[0571] In some embodiments, contacting cells with an ASO that is complementary to a targeted portion of a SCN1A pre-mRNA transcript results in a decrease in the amount of mRNA encoding SCN1A, including the mature mRNA encoding the target protein. In some embodiments, the amount of mRNA encoding Na_{V}1.1 protein, or the mature mRNA encoding the Na_{V}1.1 protein, is decreased by at least 10, 20, 30, 40, 50, 60, 80, 100, 150, 200, 250, 300, 350, 400, 450, 500, or 1000%, compared to the amount of the protein produced by a cell in the absence of the ASO/absence of treatment. In some embodiments, the total amount of the mRNA encoding Na_{V}1.1 protein, or the mature mRNA encoding Na_{V}1.1 protein produced in the cell to which the antisense oligomer is contacted is decreased about 1.1 to about 10-fold, about 1.5 to about 10-fold, about 2 to about 10-fold, about 3 to about 10-fold, about 4 to about 10-fold, about 1.1 to about 5-fold, about 1.1 to about 6-fold, about 1.1 to about 7-fold, about 1.1 to about 8-fold, about 1.1 to about 9-fold, about 2 to about 5-fold, about 2 to about 6-fold, about 2 to about 7-fold, about 2 to about 8-fold, about 2 to about 9-fold, about 3 to about 6-fold, about 3 to about 7-fold, about 3 to about 8-fold, about 3 to about 9-fold, about 4 to about 7-fold, about 4 to about 8-fold, about 4 to about 9-fold, at least about 1.1-fold, at least about 1.5-fold, at least about 2-fold, at least about 2.5-fold, at least about 3-fold, at least about 3.5-fold, at least about 4-fold, at least about 5-fold, or at least about 10-fold compared to the amount of mature RNA produced in an untreated cell, e.g., an untreated cell or a cell treated with a control compound. A control compound can be, for example, an oligonucleotide that is not complementary to a targeted portion of the SCN1A NIE containing pre-mRNA.

[0572] The NIE can be in any length. In some embodiments, the NIE comprises a full sequence of an intron, in which case, it can be referred to as intron retention. In some embodiments, the NIE can be a portion of the intron. In some embodiments, the NIE can be a 5′ end portion of an intron including a 5′ss sequence. In some embodiments, the NIE can be a 3′ end portion of an intron including a 3′ss sequence. In some embodiments, the NIE can be a portion within an intron without inclusion of a 5′ss sequence. In some embodiments, the NIE can be a portion within an intron without inclusion of a 3′ss sequence. In some embodiments, the NIE can be a portion within an intron without inclusion of either a 5′ss or a 3′ss sequence. In some embodiments, the NIE can be from 5 nucleotides to 10 nucleotides in length, from 10 nucleotides to 15 nucleotides in length, from 15 nucleotides to 20 nucleotides in length, from 20 nucleotides to 25 nucleotides in length, from 25 nucleotides to 30 nucleotides in length, from 30 nucleotides to 35 nucleotides in length, from 35 nucleotides to 40 nucleotides in length, from 40 nucleotides to 45 nucleotides in length, from 45 nucleotides to 50 nucleotides in length, from 50 nucleotides to 55 nucleotides in length, from 55 nucleotides to 60 nucleotides in length, from 60 nucleotides to 65 nucleotides in length, from 65 nucleotides to 70 nucleotides in length, from 70 nucleotides to 75 nucleotides in length, from 75 nucleotides to 80 nucleotides in length, from 80 nucleotides to 85 nucleotides in length, from 85 nucleotides to 90 nucleotides in length, from 90 nucleotides to 95 nucleotides in length, or from 95 nucleotides to 100 nucleotides in length. In some embodiments, the NIE can be at least 10 nucleotides, at least 20 nucleotides, at least 30 nucleotides, at least 40 nucleotides, at least 50 nucleotides, at least 60 nucleoids, at least 70 nucleotides, at least 80 nucleotides in length, at least 90 nucleotides, or at least 100 nucleotides in length. In some embodiments, the NIE can be from 100 to 200 nucleotides in length, from 200 to 300 nucleotides in length, from 300 to 400 nucleotides in length, from 400 to 500 nucleotides in length, from 500 to 600 nucleotides in length, from 600 to 700 nucleotides in length, from 700 to 800 nucleotides in length, from 800 to 900 nucleotides in length, from 900 to 1,000 nucleotides in length. In some embodiments, the NIE may be longer than 1,000 nucleotides in length.

[0573] Inclusion of a pseudo-exon can lead to a frameshift and the introduction of a premature termination codon (PIC) in the mature mRNA transcript rendering the transcript a target of NMD. Mature mRNA transcript containing NIE can be non-productive mRNA transcript which does not lead to protein expression. The PIC can be present in any position downstream of an NIE. In some embodiments, the PIC can be present in any exon downstream of an NIE. In some embodiments, the PIC can be present within the NIE. For example, inclusion of exon 20x in an mRNA transcript encoded by the SCN1A gene can induce a PIC in the mRNA transcript, e.g., a PIC in exon 21 of the mRNA transcript.

[0574] ASOs that when hybridized to a region of a pre-mRNA result in exon skipping (or enhanced splicing of the intron containing a NIE) and increased protein production may be tested in vivo using animal models, for example transgenic mouse models in which the full-length human gene has been knocked-in or in humanized mouse models of disease. Suitable routes for administration of ASOs may vary depending on the disease and/or the cell types to which delivery of the ASOs is desired. ASOs may be administered, for example, by intrathecal injection, intracerebroventricular injection, intraperitoneal injection, intramuscular injection, subcutaneous injection, intravitreal injection, or intravenous injection. Following administration, the cells, tissues, and/or organs of the model animals may be assessed to determine the effect of the ASO treatment by for example evaluating splicing (efficiency, rate, extent) and protein production by methods known in the art and described herein. The animal models may also be any phenotypic or behavioral indication of the disease or disease seventy.

[0575] In embodiments, the antisense oligonucleotide is administered with one or more agents capable of promoting penetration of the subject antisense oligonucleotide across the blood-brain barrier by any method known in the art. For example, delivery of agents by administration of an adenovirus vector to motor neurons in muscle tissue is described in U.S. Pat. No. 6,632,427, “Adenoviral-vector-mediated gene transfer into medullary motor neurons,” incorporated herein by reference. Delivery of vectors directly to the brain, e.g., the striatum, the thalamus, the hippocampus, or the substantia nigra, is described, e.g., in U.S. Pat. No. 6,756,523, “Adenovirus vectors for the transfer of foreign genes into cells of the central nervous system particularly in brain,” incorporated herein by reference.

[0576] In embodiments, the antisense oligonucleotides are linked or conjugated with agents that provide desirable pharmaceutical or pharmacodynamic properties. In embodiments, the antisense oligonucleotide is coupled to a substance, known in the art to promote penetration or transport across the blood-brain barrier, e.g., an antibody to the transferrin receptor. In embodiments, the antisense oligonucleotide is linked with a viral vector, e.g., to render the antisense compound more effective or increase transport across the blood-brain barrier. In embodiments, osmotic blood brain barrier disruption is assisted by infusion of sugars, e.g., meso erythritol, xylitol, D(+) galactose, D(+) lactose, D(+) xylose, dulcitol, myo-inositol, L(−) fructose, D(−) mannitol, D(+) glucose, D(+) arabinose, D(−) arabinose, cellobiose, D(+) maltose, D(+) raffinose, L(+) rhamnose, D(+) melibiose, D(−) ribose, adonitol, D(+) arabitol, L(−) arabitol, D(+) fucose, L(−) fucose, D(−) lyxose, L(+) lyxose, and L(−) lyxose, or amino acids, e.g., glutamine, lysine, arginine, asparagine, aspartic acid, cysteine, glutamic acid, glycine, histidine, leucine, methionine, phenylalanine, proline, serine, threonine, tyrosine, valine, and taurine. Methods and materials for enhancing blood brain barrier penetration are described, e.g., in U.S. Pat. No. 9,193,969, “Compositions and methods for selective delivery of oligonucleotide molecules to specific neuron types,” U.S. Pat. No. 4,866,042, “Method for the delivery of genetic material across the blood brain barrier,” U.S. Pat. No. 6,294,520, “Material for passage through the blood-brain barrier,” and U.S. Pat. No. 6,936,589, “Parenteral delivery systems,” each incorporated herein by reference.

[0577] In embodiments, an ASO of the disclosure is coupled to a dopamine reuptake inhibitor (DRI), a selective serotonin reuptake inhibitor (SSRI), a noradrenaline reuptake inhibitor (NRI), a norepinephrine-dopamine reuptake inhibitor (NDRI), and a serotonin-norepinephrine-dopamine reuptake inhibitor (SNDRI), using methods described in, e.g., U.S. Pat. No. 9,193,969, incorporated herein by reference.

[0578] In embodiments, subjects treated using the methods and compositions are evaluated for improvement in condition using any methods known and described in the art.

[0579] In some embodiments, the SCN1A NIE containing pre-mRNA transcript is encoded by a genetic sequence with at least about 80%, 85%, 90%, 95%, 96%, 97%, 98%, 99% or 100% sequence identity to any one of the sequences listed in Table 1 or Table 2. In some embodiments, the SCN1A NIE pre-mRNA transcript comprises a sequence with at least about 80%, 85%, 90%, 95%, 96%, 97%, 98%, 99% or 100% sequence identity to any one of the sequences listed in Table 1 or Table 2.

[0580] In some embodiments, the SCN1A NIE containing pre-mRNA transcript comprises a sequence with at least about 80%, 85%, 90%, 95%, 97%, or 100% sequence identity to any one of the sequences listed in Table 1 or Table 2. In some embodiments, SCN1A NIE containing pre-mRNA transcript is encoded by a sequence with at least about 80%, 85%, 90%, 95%, 97%, or 100% sequence identity to any one of the sequences listed in Table 1 or Table 2. In some embodiments, the targeted portion of the pre-mRNA containing an NMD exon and encoding Na_{V}1.1 comprises a sequence with at least 80%, 85%, 90%, 95%, 97%, or 100% sequence identity to a region comprising at least 8 contiguous nucleic acids of any one of the sequences listed in Table 1 or Table 2.

[0581] In some embodiments, the pre-mRNA transcript comprises a sequence with at least about 80%, 85%, 90%, 95%, 96%, 97%, 98%, 99% or 100% sequence identity to a pre-mRNA transcript of SCN1A pre-mRNA transcripts or a complement thereof described herein. In some embodiments, the targeted portion of the pre-mRNA selected from the group consisting of SCN1A pre-mRNAs comprises a sequence with at least 80%, 85%, 90%, 95%, 97%, or 100% sequence identity to a region comprising at least 8 contiguous nucleic acids of a sequence of the pre-mRNA transcripts of Table 1 or Table 2 or complements thereof. In some embodiments, the targeted portion of the pre-mRNA of SCN1A pre-mRNA comprises a sequence that is complementary to at least 8, 9, 10, 11, 12, 13, 14, 15, 16, 17, 18, 19 or 20 contiguous nucleic acids of a sequence of Table 1 or Table 2 or a complement thereof.

[0582] In some embodiments, the pre-mRNA transcript comprises a sequence with at least about 80%, 85%, 90%, 95%, 96%, 97%, 98%, 99% or 100% sequence identity to a pre-mRNA transcript of SCN1A pre-mRNA transcripts or a complement thereof described herein. In some embodiments, the targeted portion of the pre-mRNA selected from the group consisting of SCN1A pre-mRNAs comprises a sequence with at least 80%, 85%, 90%, 95%, 97%, or 100% sequence identity to a region comprising at least 8 contiguous nucleic acids of a sequence of the pre-mRNA transcripts of Table 1 or Table 2 or complements thereof. In some embodiments, the targeted portion of the pre-mRNA of SCN1A pre-mRNA comprises a sequence that is complementary to at least 8, 9, 10, 11, 12, 13, 14, 15, 16, 17, 18, 19 or 20 contiguous nucleic acids of a sequence of Table 1 or Table 2 or a complement thereof.

[0583] In some embodiments, the targeted portion of the SCN1A pre-mRNA comprises a sequence with at least 80%, 85%, 90%, 95%, 97%, or 100% sequence identity to a region comprising at least 8 contiguous nucleic acids of a sequence of sequence of Table 3 or complements thereof. In some embodiments, the targeted portion of the SCN1A pre-mRNA comprises a sequence with at least 80%, 85%, 90%, 95%, 97%, or 100% sequence identity to a region comprising at least 8 contiguous nucleic acids of a sequence selected from the group consisting of sequences listed in Table 2 or Table 3 or complements thereof.

[0584] In some embodiments, the ASO has a sequence complementary to the targeted portion of the pre-mRNA containing an NMD exon according to any one of the sequences listed in Table 1 or Table 2. In some embodiments, the ASO targets a sequence upstream from the 5′ end of an NIE. For example, ASOs targeting a sequence upstream from the 5′ end of an NIE comprises a sequence that is at least about 80%, 85%, 90%, 95%, 97%, or 100% complimentary to at least 8 contiguous nucleic acids of any one of the sequences listed in Table 1 or Table 2. For example, ASOs targeting a sequence upstream from the 5′ end of an NIE can comprise a sequence with at least 80%, 85%, 90%, 95%, 97%, or 100% sequence identity to any one of the sequences listed in Table 1 or Table 2.

[0585] In some embodiments, the ASOs target a sequence containing an exon-intron boundary (or junction). For example, ASOs targeting a sequence containing an exon-intron boundary can comprise a sequence that is at least about 80%, 85%, 90%, 95%, 97%, or 100% complimentary to at least 8 contiguous nucleic acids of any one of the sequences listed in Table 1 or Table 2. In some embodiments, the ASOs target a sequence downstream from the 3′ end of an NIE. For example, ASOs targeting a sequence downstream from the 3′ end of an NIE can comprise a sequence with at least 80%, 85%, 90%, 95%, 97%, or 100% sequence identity to any one of the sequences listed in Table 1 or Table 2. For example, ASOs targeting a sequence downstream from the 3′ end of an NIE can comprise a sequence with at least 80%, 85%, 90%, 95%, 97%, or 100% sequence identity to any one of the sequences listed in Table 1 or Table 2. In some embodiments, ASOs target a sequence within an NIE.

Methods of Identifying Additional ASOs that Induce Exon Skipping

[0586] Also within the scope of the present disclosure are methods for identifying or determining ASOs that induce exon skipping of a SCN1A NIE containing pre-mRNA. For example, a method can comprise identifying or determining ASOs that induce pseudo-exon skipping of a SCN1A NIE containing pre-mRNA. ASOs that specifically hybridize to different nucleotides within the target region of the pre-mRNA may be screened to identify or determine ASOs that improve the rate and/or extent of splicing of the target intron. In some embodiments, the ASO may block or interfere with the binding site(s) of a splicing repressor(s)/silencer. Any method known in the art may be used to identify (determine) an ASO that when hybridized to the target region of the exon results in the desired effect (e.g., pseudo-exon skipping, protein or functional RNA production). These methods also can be used for identifying ASOs that induce exon skipping of the included exon by binding to a targeted region in an intron flanking the included exon, or in a non-included exon. An example of a method that may be used is provided below.

[0587] A round of screening, referred to as an ASO “walk” may be performed using ASOs that have been designed to hybridize to a target region of a pre-mRNA. For example, the ASOs used in the ASO walk can be tiled every 5 nucleotides from approximately 100 nucleotides upstream of the 3′ splice site of the included exon (e.g., a portion of sequence of the exon located upstream of the target/included exon) to approximately 100 nucleotides downstream of the 3′ splice site of the target/included exon and/or from approximately 100 nucleotides upstream of the 5′ splice site of the included exon to approximately 100 nucleotides downstream of the 5′ splice site of the target/included exon (e.g., a portion of sequence of the exon located downstream of the target/included exon). For example, a first ASO of 15 nucleotides in length may be designed to specifically hybridize to nucleotides +6 to +20 relative to the 3′ splice site of the target/included exon. A second ASO may be designed to specifically hybridize to nucleotides +11 to +25 relative to the 3′ splice site of the target/included exon. ASOs are designed as such spanning the target region of the pre-mRNA. In embodiments, the ASOs can be tiled more closely, e.g., every 1, 2, 3, or 4 nucleotides. Further, the ASOs can be tiled from 100 nucleotides downstream of the 5′ splice site, to 100 nucleotides upstream of the 3′ splice site. In some embodiments, the ASOs can be tiled from about 1,160 nucleotides upstream of the 3′ splice site, to about 500 nucleotides downstream of the 5′ splice site. In some embodiments, the ASOs can be tiled from about 500 nucleotides upstream of the 3′ splice site, to about 1,920 nucleotides downstream of the 3′ splice site.

[0588] One or more ASOs, or a control ASO (an ASO with a scrambled sequence, sequence that is not expected to hybridize to the target region) are delivered, for example by transfection, into a disease-relevant cell line that expresses the target pre-mRNA (e.g., a NIE containing pre-mRNA described herein). The exon skipping effects of each of the ASOs may be assessed by any method known in the art, for example by reverse transcriptase (RT)-PCR using primers that span the splice junction. A reduction or absence of a longer RT-PCR product produced using the primers spanning the region containing the included exon (e.g. including the flanking exons of the NIE) in ASO-treated cells as compared to in control ASO-treated cells indicates that splicing of the target NIE has been enhanced. In some embodiments, the exon skipping efficiency (or the splicing efficiency to splice the intron containing the NIE), the ratio of spliced to unspliced pre-mRNA, the rate of splicing, or the extent of splicing may be improved using the ASOs described herein. The amount of protein or functional RNA that is encoded by the target pre-mRNA can also be assessed to determine whether each ASO achieved the desired effect (e.g., enhanced functional protein production). Any method known in the art for assessing and/or quantifying protein production, such as Western blotting, flow cytometry, immunofluorescence microscopy, and ELISA, can be used.

[0589] A second round of screening, referred to as an ASO “micro-walk” may be performed using ASOs that have been designed to hybridize to a target region of a pre-mRNA. The ASOs used in the ASO micro-walk are tiled every 1 nucleotide to further refine the nucleotide acid sequence of the pre-mRNA that when hybridized with an ASO results in exon skipping (or enhanced splicing of NIE).

[0590] Regions defined by ASOs that promote splicing of the target intron are explored in greater detail by means of an ASO “micro-walk”, involving ASOs spaced in 1-nt steps, as well as longer ASOs, typically 18-25 nt.

[0591] As described for the ASO walk above, the ASO micro-walk is performed by delivering one or more ASOs, or a control ASO (an ASO with a scrambled sequence, sequence that is not expected to hybridize to the target region), for example by transfection, into a disease-relevant cell line that expresses the target pre-mRNA. The splicing-inducing effects of each of the ASOs may be assessed by any method known in the art, for example by reverse transcriptase (RT)-PCR using primers that span the NIE, as described herein. A reduction or absence of a longer RT-PCR product produced using the primers spanning the NIE in ASO-treated cells as compared to in control ASO-treated cells indicates that exon skipping (or splicing of the target intron containing an NIE) has been enhanced. In some embodiments, the exon skipping efficiency (or the splicing efficiency to splice the intron containing the NIE), the ratio of spliced to unspliced pre-mRNA, the rate of splicing, or the extent of splicing may be improved using the ASOs described herein. The amount of protein or functional RNA that is encoded by the target pre-mRNA can also be assessed to determine whether each ASO achieved the desired effect (e.g., enhanced functional protein production). Any method known in the art for assessing and/or quantifying protein production, such as Western blotting, flow cytometry, immunofluorescence microscopy, and ELISA, can be used.

### Kits and Compositions

[0592] In some aspects, provided herein is a kit comprising: an concentrate comprising an antisense oligomer (ASO), wherein the ASO comprises a sequence with at least 80% sequence identity to any one of SEQ ID NOs: 21-67, 210-256 or 304-1099; and a diluent, wherein the concentrate is miscible with the diluent; and instructions for diluting or solubilizing the ASO in the diluent. In some embodiments, the ASO comprises a sequence with at least 80% sequence identity to any one of the sequences listed in listed in Tables 4a, 4b, 5a, 5b, 6a, 6b, 7, 8a, and 8b.

[0593] In some embodiments, the ASO comprises a sequence with at least 60%, 65%, 66%, 67%, 68%, 69%, 70%, 71%, 72%, 73%, 74%, 75%, 76%, 77%, 78%, 79%, 80%, 81%, 82%, 83%, 884%, 85%, 86%, 87%, 88%, 89%, 90%, 91%, 92%, 93%, 94%, 95%, 96%, 97%, 98%, 99%, 99.5%, 99.8%, 99.9%, or 100% sequence identity to any one of SEQ ID NOs: 21-67, 210-256 or 304-1099. In some embodiments, the ASO consists of a sequence with at least 60%, 65%, 66%, 67%, 68%, 69%, 70%, 71%, 72%, 73%, 74%, 75%, 76%, 77%, 78%, 79%, 80%, 81%, 82%, 83%, 884%, 85%, 86%, 87%, 88%, 89%, 90%, 91%, 92%, 93%, 94%, 95%, 96%, 97%, 98%, 99%, 99.5%, 99.8%, 99.9%, or 100% sequence identity to any one of SEQ ID NOs: 21-67, 210-256 or 304-1099. In some embodiments, the ASO comprises a sequence with at least 60%, 65%, 66%, 67%, 68%, 69%, 70%, 71%, 72%, 73%, 74%, 75%, 76%, 77%, 78%, 79%, 80%, 81%, 82%, 83%, 884%, 85%, 86%, 87%, 88%, 89%, 90%, 91%, 92%, 93%, 94%, 95%, 96%, 97%, 98%, 99%, 99.5%, 99.8%, 99.9%, or 100% sequence identity to any one of the sequences listed in listed in Tables 4a, 4b, 5a, 5b, 6a, 6b, 7, 8a, and 8b. In some embodiments, the ASO consists of a sequence with at least 60%, 65%, 66%, 67%, 68%, 69%, 70%, 71%, 72%, 73%, 74%, 75%, 76%, 77%, 78%, 79%, 80%, 81%, 82%, 83%, 884%, 85%, 86%, 87%, 88%, 89%, 90%, 91%, 92%, 93%, 94%, 95%, 96%, 97%, 98%, 99%, 99.5%, 99.8%, 99.9%, or 100% sequence identity to any one of the sequences listed in listed in Tables 4a, 4b, 5a, 5b, 6a, 6b, 7, 8a, and 8b.

[0594] In some embodiments, the diluent is an artificial cerebral spinal fluid (aCSF) solution. In some embodiments, the solution comprises a cerebral spinal fluid (CSF) sample from the subject. In some embodiments, the diluent comprises an isotonic solution. In some embodiments, the diluent comprises a phosphate-buffered (pH 6.6-7.6) solution.

[0595] In some embodiments, the ASO as described herein is solubilized or diluted in a phosphate-buffered (pH 6.6-7.6) solution. In some embodiments, the ASO as described herein is solubilized or diluted in a phosphate-buffered (pH 6.0-8.0) solution. In some embodiments, the ASO as described herein is solubilized or diluted in a phosphate-buffered (pH 5.0-8.0) solution. In some embodiments, the ASO as described herein is solubilized or diluted in a phosphate-buffered solution with pH 4.5-8.5, pH 4.6-8.5, pH 4.7-8.5, pH 4.8-8.5, pH 4.9-8.5, pH5.0-8.5, pH 5.1-8.5, pH5.2-8.5, pH 5.3-8.5, pH5.4-8.5, pH 5.5-8.5, pH5.6-8.5, pH 5.7-8.5, pH 5.8-8.5, H 5.9-8.5, pH 6.0-8.5, pH 6.1-8.5, pH 6.2-8.5, pH 6.3-8.5, pH 6.4-8.5, pH 6.5-8.5, pH 6.6-8.5, pH 6.7-8.5, pH 6.8-8.5, pH 6.9-8.5, pH 7.0-8.5, pH 7.1-8.5, pH 7.2-8.5, pH 7.3-8.5, pH 7.4-8.5, pH 7.5-8.5, pH 7.6-8.5, pH 7.7-8.5, pH 7.8-8.5, pH 7.9-8.5, pH 8.0-8.5, pH 8.1-8.5, pH 8.2-8.5, pH 8.3-8.5, or pH 8.4-8.5. In some embodiments, the ASO as described herein is solubilized or diluted in a phosphate-buffered solution with pH 4.5-8.3, pH 4.5-8.2, pH 4.5-8.1, pH 4.5-8.0, pH 4.5-7.9, pH 4.5-7.8, pH 4.5-7.7, pH 4.5-7.6, pH 4.5-7.5, pH 4.5-7.4, pH 4.5-7.3, pH 4.5-7.2, pH 4.5-7.1, pH 4.5-7.0, pH 4.5-6.9, pH 4.5-6.8, pH 4.5-6.7, pH 4.5-6.6, pH 4.5-6.5, pH 4.5-6.4, pH 4.5-6.3, pH 4.5-6.2, pH 4.5-6.1, pH 4.5-6.0, pH 4.5-5.9, pH 4.5-5.8, pH 4.5-5.7, pH 4.5-5.6, pH 4.5-5.5, pH 4.5-5.4, pH 4.5-5.3, pH 4.5-5.2, pH 4.5-5.1, pH 4.5-5.0, pH 4.5-4.9, pH 4.5-4.8, pH 4.5-4.7, or pH 4.5-4.6. In some embodiments, the ASO as described herein is solubilized or diluted in a phosphate-buffered solution with pH 6.0-7.6, pH 6.1-7.6, pH 6.2-7.6, pH 6.3-7.6, pH 6.4-7.6, pH 6.5-7.6, pH 6.6-7.6, pH 6.7-7.6, pH 6.8-7.6, pH 6.9-7.6, pH 7.0-7.6, pH 7.1-7.6, pH 7.2-7.6, pH 7.3-7.6, pH 7.4-7.6, or pH 7.5-7.6. In some embodiments, the ASO as described herein is solubilized or diluted in a phosphate-buffered solution with pH 6.6-8.0, pH 6.6-7.9, pH 6.6-7.8, pH 6.6-7.7, pH 6.6-7.6, pH 6.6-7.5, pH 6.6-7.4, pH 6.6-7.3, pH 6.6-7.2, pH 6.6-7.1, pH 6.6-7.0, pH 6.6-6.9, pH 6.6-6.8, or pH 6.6-6.7. In some embodiments, the ASO as described herein is solubilized or diluted in a phosphate-buffered solution with pH 6.0-8.0, pH 6.1-8.0, pH 6.2-8.0, pH 6.3-8.0, pH 6.4-8.0, pH 6.5-8.0, pH 6.6-8.0, pH 6.7-8.0, pH 6.8-8.0, pH 6.9-8.0, pH 7.0-8.0, pH 7.1-8.0, pH 7.2-8.0, pH 7.3-8.0, pH 7.4-8.0, pH 7.5-8.0, pH 7.6-8.0, pH 7.7-8.0, pH 7.8-8.0, or pH 7.9-8.0. In some embodiments, the ASO as described herein is solubilized or diluted in a phosphate-buffered solution with pH 6.0-7.9, pH 6.0-7.8, pH 6.0-7.7, pH 6.0-7.6, pH 6.0-7.5, pH 6.0-7.4, pH 6.0-7.3, pH 6.0-7.2, pH 6.0-7.1, pH 6.0-7.0, pH 6.0-6.9, pH 6.0-6.8, pH 6.0-6.7, pH 6.0-6.6, pH 6.0-6.5, pH 6.0-6.4, pH 6.0-6.3, pH 6.0-6.2, or pH 6.0-6.1. In some embodiments, the ASO as described herein is solubilized or diluted in a phosphate-buffered solution with pH 5.7-8.5, 5.8-8.4, 5.9-8.3, 6.0-8.2, 6.1-8.1, 6.2-8.0, 6.3-7.9, 6.4-7.8, 6.5-7.7, or 6.6-7.6. In some embodiments, the ASO as described herein is solubilized or diluted in a phosphate-buffered solution with pH about 5.0, 5.1, 5.2, 5.3, 5.4, 5.5, 5.6, 5.7, 5.8, 5.9, 6.0. 6.1, 6.2, 6.3, 6.4, 6.5, 6.6, 6.7, 6.8, 6.9, 7.0, 7.1, 7.2, 7.3, 7.4, 7.5, 7.6, 7.7, 7.8, 7.9, or 8.0. In some embodiments, the ASO as described herein is solubilized or diluted in a phosphate-buffered solution with pH 5.0, 5.1, 5.2, 5.3, 5.4, 5.5, 5.6, 5.7, 5.8, 5.9, 6.0. 6.1, 6.2, 6.3, 6.4, 6.5, 6.6, 6.7, 6.8, 6.9, 7.0, 7.1, 7.2, 7.3, 7.4, 7.5, 7.6, 7.7, 7.8, 7.9, or 8.0.

[0596] In some embodiments, the diluent comprises 25-250 mM NaCl.

[0597] In some embodiments, the diluent comprises 25-250, 30-250, 35-250, 40-250, 45-250, 50-250, 55-250, 60-250, 65-250, 70-250, 75-250, 80-250, 85-250, 90-250, 95-250, 100-250, 105-250, 110-250, 115-250, 120-250, 125-250, 130-250, 135-250, 140-250, 145-250, 150-250, 155-250, 160-250, 165-250, 170-250, 175-250, 180-250, 185-250, 190-250, 195-250, 200-250, 205-250, 210-250, 215-250, 220-250, 225-250, 230-250, 235-250, 240-250, or 245-250 mM NaCl. In some embodiments, the diluent comprises 25-245, 25-240, 25-235, 25-230, 25-225, 25-220, 25-215, 25-210, 25-205, 25-200, 25-195, 25-190, 25-185, 25-180, 25-175, 25-170, 25-165, 25-160, 25-155, 25-150, 25-145, 25-140, 25-135, 25-130, 25-125, 25-120, 25-115, 25-110, 25-105, 25-110, 25-105, 25-100, 25-95, 25-90, 25-85, 25-80, 25-75, 25-70, 25-65, 25-60, 25-55, 25-50, 25-45, 25-40, 25-35, or 25-30 mM NaCl. In some embodiments, the diluent comprises 30-245, 35-240, 40-235, 45-230, 50-225, 55-220, 60-215, 65-210, 70-205, 75-200, 80-195, 85-190, 90-185, 95-180, 100-175, 105-170, 110-165, 115-160, 120-155, 125-150, 130-145 or 135-140 mM NaCl. In some embodiments, the diluent comprises 100-140, 101-140, 102-140, 103-140, 104-140, 105-140, 106-140, 107-140, 108-140, 109-140, 110-140, 111-140, 112-140, 113-140, 114-140, 115-140, 116-140, 117-140, 118-140, 119-140, 120-140, 121-140, 122-140, 123-140, 124-140, 125-140, 126-140, 127-140, 128-140, 129-140, 130-140, 131-140, 132-140, 133-140, 134-140, 135-140, 136-140, 137-140, 138-140, or 139-140 mM NaCl. In some embodiments, the diluent comprises 100-139, 100-138, 100-137, 100-136, 100-135, 100-134, 100-133, 100-132, 100-131, 100-130, 100-129, 100-128, 100-127, 100-126, 100-125, 100-124, 100-123, 100-122, 100-121, 100-120, 100-119, 100-118, 100-117, 100-116, 100-115, 100-114, 100-113, 100-112, 100-111, 100-110, 100-109, 100-108, 100-107, 100-106, 100-105, 100-104, 100-103, 100-102, or 100-101 mM NaCl. In some embodiments, the diluent comprises at least 90, 91, 92, 93, 94, 95, 96, 97, 98, 99, 100, 101, 102, 103, 104, 105, 106, 107, 108, 109, 110, 111, 112, 113, 114, 115, 116, 118, 119, 120, 121, 122, 123, 124, 125, 126, 127, 128, 129, 130, 131, 132, 133, 134, 135, 136, 137, 138, 139, or 140 mM NaCl. In some embodiments, the diluent comprises at most 90, 91, 92, 93, 94, 95, 96, 97, 98, 99, 100, 101, 102, 103, 104, 105, 106, 107, 108, 109, 110, 111, 112, 113, 114, 115, 116, 118, 119, 120, 121, 122, 123, 124, 125, 126, 127, 128, 129, 130, 131, 132, 133, 134, 135, 136, 137, 138, 139, or 140 mM NaCl. In some embodiments, the diluent comprises 90, 91, 92, 93, 94, 95, 96, 97, 98, 99, 100, 101, 102, 103, 104, 105, 106, 107, 108, 109, 110, 111, 112, 113, 114, 115, 116, 118, 119, 120, 121, 122, 123, 124, 125, 126, 127, 128, 129, 130, 131, 132, 133, 134, 135, 136, 137, 138, 139, or 140 mM NaCl.

[0598] In some embodiments, the diluent comprises 0.1-20 mM KCl.

[0599] In some embodiments, the diluent comprises 0.1-40, 0.1-39, 0.1-38, 0.1-37, 0.1-36, 0.1-35, 0.1-34, 0.1-33, 0.1-32, 0.1-31, 0.1-30, 0.1-29, 0.1-28, 0.1-27, 0.1-26, 0.1-25, 0.1-24, 0.1-23, 0.1-22, 0.1-21, 0.1-20, 0.1-19, 0.1-18, 0.1-17, 0.1-16, 0.1-15, 0.1-14, 0.1-13, 0.1-12, 0.1-10, 0.1-9, 0.1-8, 0.1-7, 0.1-6, 0.1-5, 0.1-4, 0.1-3, 0.1-2, or 0.1-1 mM KCl. In some embodiments, the diluent comprises 0.2-40, 0.3-40, 0.4-40, 0.5-40, 0.6-40, 0.7-40, 0.8-40, 0.9-40, 1-40, 2-40, 3-40, 4-40, 5-40, 6-40, 7-40, 8-40, 9-40, 10-40, 11-40, 12-40, 13-40, 14-40, 15-40, 16-40, 17-40, 18-40, 19-40, 20-40, 21-40, 22-40, 23-40, 24-40, 25-40, 26-40, 27-40, 28-40, 29-40, 30-40, 31-40, 32-40, 33-40, 34-40, 35-40, 36-40, 37-40, 38-40, or 39-40 mM KCl. In some embodiments, the diluent comprises 0.1-3.5, 0.2-3.5, 0.3-3.5, 0.4-3.5, 0.5-3.5, 0.6-3.5, 0.7-3.5, 0.8-3.5, 0.9-3.5, 1.0-3.5, 1.1-3.5, 1.2-3.5, 1.3-3.5, 1.4-3.5, 1.5-3.5, 1.6-3.5, 1.7-3.5, 1.8-3.5, 1.9-3.5, 2.0-3.5, 2.1-3.5, 2.2-3.5, 2.3-3.5, 2.4-3.5, 2.5-3.5, 2.6-3.5, 2.7-3.5, 2.8-3.5, 2.9-3.5, 3.0-3.5, 3.1-3.5, 3.2-3.5, 3.3-3.5, or 3.4-3.5 mM KCl. In some embodiments, the diluent comprises 0.1-3.4, 0.1-3.3, 0.1-3.2, 0.1-3.1, 0.1-3.0, 0.1-2.9, 0.1-2.8, 0.1-2.7, 0.1-2.6, 0.1-2.5, 0.1-2.4, 0.1-2.3, 0.1-2.2, 0.1-2.1, 0.1-2.0, 0.1-1.9, 0.1-1.8, 0.1-1.7, 0.1-1.6, 0.1-1.5, 0.1-1.4, 0.1-1.3, 0.1-1.2, 0.1-1.1, 0.1-1.0, 0.1-0.9, 0.1-0.8, 0.1-0.7, 0.1-0.6, 0.1-0.5, 0.1-0.4, 0.1-0.3, or 0.1-0.2 mM KCl. In some embodiments, the diluent comprises at least 0.1, 0.2, 0.3, 0.4, 0.5, 0.6, 0.7, 0.8, 0.9, 1.0, 1.1, 1.2, 1.3, 1.4, 1.5, 1.6, 1.7, 1.8, 1.9, 2.0, 2.1, 2.2, 2.3, 2.4, 2.5, 2.6, 2.7, 2.8, 2.9, 3.0, 3.1, 3.2, 3.3, 3.4, or 3.5 mM KCl. In some embodiments, the diluent comprises at most 0.1, 0.2, 0.3, 0.4, 0.5, 0.6, 0.7, 0.8, 0.9, 1.0, 1.1, 1.2, 1.3, 1.4, 1.5, 1.6, 1.7, 1.8, 1.9, 2.0, 2.1, 2.2, 2.3, 2.4, 2.5, 2.6, 2.7, 2.8, 2.9, 3.0, 3.1, 3.2, 3.3, 3.4, or 3.5 mM KCl. In some embodiments, the diluent comprises 0.1, 0.2, 0.3, 0.4, 0.5, 0.6, 0.7, 0.8, 0.9, 1.0, 1.1, 1.2, 1.3, 1.4, 1.5, 1.6, 1.7, 1.8, 1.9, 2.0, 2.1, 2.2, 2.3, 2.4, 2.5, 2.6, 2.7, 2.8, 2.9, 3.0, 3.1, 3.2, 3.3, 3.4, or 3.5 mM KCl.

[0600] In some embodiments, the diluent comprises 0-50 mM Na₂HPO₄.

[0601] In some embodiments, the diluent comprises 0-50, 0-45, 0-40, 0-35, 0-30, 0-25, 0-20, 0-19, 0-18, 0-17, 0-16, 0-15, 0-14, 0-13, 0-12, 0-11, 0-10, 0-9, 0-8, 0-7, 0-6, 0-5, 0-4, 0-3, 0-2, 0-1, 0-0.9, 0-0.8, 0-0.7, 0-0.6, 0-0.5, 0-0.4, 0-0.3, or 0-0.2 mM Na₂HPO₄. In some embodiments, the diluent comprises 0.1-50, 0.1-45, 0.1-40, 0.1-35, 0.1-30, 0.1-25, 0.1-20, 0.1-19, 0.1-18, 0.1-17, 0.1-16, 0.1-15, 0.1-14, 0.1-13, 0.1-12, 0.1-11, 0.1-10, 0.1-9, 0.1-8, 0.1-7, 0.1-6, 0.1-5, 0.1-4, 0.1-3, 0.1-2, 0.1-1, 0.1-0.9, 0.1-0.8, 0.1-0.7, 0.1-0.6, 0.1-0.5, 0.1-0.4, 0.1-0.3, or 0.1-0.2 mM Na₂HPO₄. In some embodiments, the diluent comprises 0-50, 0.1-50, 0.2-50, 0.3-50, 0.4-50, 0.5-50, 0.6-50, 0.7-50, 0.8-50, 0.9-50, 1-50, 2-50, 3-50, 4-50, 5-50, 6-50, 7-50, 8-50, 9-50, 1-50, 11-50, 12-50, 13-50, 14-50, 15-50, 16-50, 17-50, 18-50, 19-50, 20-50, 25-50, 30-50, 35-50, 40-50, or 45-50 mM Na₂HPO₄. In some embodiments, the diluent comprises 0-20, 0.1-20, 0.2-20, 0.3-20, 0.4-20, 0.5-20, 0.6-20, 0.7-20, 0.8-20, 0.9-20, 1-20, 2-20, 3-20, 4-20, 5-20, 6-20, 7-20, 8-20, 9-20, 10-20, 11-20, 12-20, 13-20, 14-20, 15-20, 16-20, 17-20, 18-20, or 19-20 mM Na₂HPO₄. In some embodiments, the diluent comprises at least 0, 0.1, 0.2, 0.3, 0.4, 0.5, 0.6, 0.7, 0.8, 0.9, 1, 2, 3, 4, 5, 6, 7, 8, 9, 10, 11, 12, 13, 14, 15, 16, 17, 18, 19, or 20 mM Na₂HPO₄. In some embodiments, the diluent comprises at most 0, 0.1, 0.2, 0.3, 0.4, 0.5, 0.6, 0.7, 0.8, 0.9, 1, 2, 3, 4, 5, 6, 7, 8, 9, 10, 11, 12, 13, 14, 15, 16, 17, 18, 19, or 20 mM Na₂HPO₄. In some embodiments, the diluent comprises 0, 0.1, 0.2, 0.3, 0.4, 0.5, 0.6, 0.7, 0.8, 0.9, 1, 2, 3, 4, 5, 6, 7, 8, 9, 10, 11, 12, 13, 14, 15, 16, 17, 18, 19, or 20 mM Na₂HPO₄.

[0602] In some embodiments, the diluent comprises 0-50 mM NaH₂PO₄.

[0603] In some embodiments, the diluent comprises 0-50, 0-45, 0-40, 0-35, 0-30, 0-25, 0-20, 0-19, 0-18, 0-17, 0-16, 0-15, 0-14, 0-13, 0-12, 0-11, 0-10, 0-9, 0-8, 0-7, 0-6, 0-5, 0-4, 0-3, 0-2, 0-1, 0-0.9, 0-0.8, 0-0.7, 0-0.6, 0-0.5, 0-0.4, 0-0.3, or 0-0.2 mM NaH₂PO₄. In some embodiments, the diluent comprises 0.1-50, 0.1-45, 0.1-40, 0.1-35, 0.1-30, 0.1-25, 0.1-20, 0.1-19, 0.1-18, 0.1-17, 0.1-16, 0.1-15, 0.1-14, 0.1-13, 0.1-12, 0.1-11, 0.1-10, 0.1-9, 0.1-8, 0.1-7, 0.1-6, 0.1-5, 0.1-4, 0.1-3, 0.1-2, 0.1-1, 0.1-0.9, 0.1-0.8, 0.1-0.7, 0.1-0.6, 0.1-0.5, 0.1-0.4, 0.1-0.3, or 0.1-0.2 mM NaH₂PO₄. In some embodiments, the diluent comprises 0-50, 0.1-50, 0.2-50, 0.3-50, 0.4-50, 0.5-50, 0.6-50, 0.7-50, 0.8-50, 0.9-50, 1-50, 2-50, 3-50, 4-50, 5-50, 6-50, 7-50, 8-50, 9-50, 1-50, 11-50, 12-50, 13-50, 14-50, 15-50, 16-50, 17-50, 18-50, 19-50, 20-50, 25-50, 30-50, 35-50, 40-50, or 45-50 mM NaH₂PO₄. In some embodiments, the diluent comprises 0-20, 0.1-20, 0.2-20, 0.3-20, 0.4-20, 0.5-20, 0.6-20, 0.7-20, 0.8-20, 0.9-20, 1-20, 2-20, 3-20, 4-20, 5-20, 6-20, 7-20, 8-20, 9-20, 10-20, 11-20, 12-20, 13-20, 14-20, 15-20, 16-20, 17-20, 18-20, or 19-20 mM NaH₂PO₄. In some embodiments, the diluent comprises at least 0, 0.1, 0.2, 0.3, 0.4, 0.5, 0.6, 0.7, 0.8, 0.9, 1, 2, 3, 4, 5, 6, 7, 8, 9, 10, 11, 12, 13, 14, 15, 16, 17, 18, 19, or 20 mM NaH₂PO₄. In some embodiments, the diluent comprises at most 0, 0.1, 0.2, 0.3, 0.4, 0.5, 0.6, 0.7, 0.8, 0.9, 1, 2, 3, 4, 5, 6, 7, 8, 9, 10, 11, 12, 13, 14, 15, 16, 17, 18, 19, or 20 mM NaH₂PO₄. In some embodiments, the diluent comprises 0, 0.1, 0.2, 0.3, 0.4, 0.5, 0.6, 0.7, 0.8, 0.9, 1, 2, 3, 4, 5, 6, 7, 8, 9, 10, 11, 12, 13, 14, 15, 16, 17, 18, 19, or 20 mM NaH₂PO₄.

[0604] In some embodiments, the diluent comprises 0.1-50 mM CaCl₂.

[0605] In some embodiments, the diluent comprises 0.1-50, 0.2-50, 0.3-50, 0.4-50, 0.5-50, 0.6-50, 0.7-50, 0.8-50, 0.9-50, 1.0-50, −50, 1.1-50, 1.2-50, 1.3-50, 1.4-50, 1.5-50, 1.6-50, 1.7-50, 1.8-50, 1.9-50, 2.0-50, 2.1-50, 2.2-50, 2.3-50, 2.4-50, 2.5-50, 2.6-50, 2.7-50, 2.8-50, 2.9-50, 3.0-50, 3.1-50, 3.2-50, 3.3-50, 3.4-50, 3.5-50, 3.6-50, 3.7-50, 3.8-50, 3.9-50, 4-50, 5-50, 6-50, 7-50, 8-50, 9-50, 10-50, 15-50, 20-50, 25-50, 1 30-50, 35-50, 40-50, or 45-50 mM CaCl₂. In some embodiments, the diluent comprises 0.1-45, 0.1-40, 0.1-35, 0.1-30, 0.1-25, 0.1-20, 0.1-15, 0.1-10, 0.1-5, 0.1-4, 0.1-4.9, 0.1-4.8, 0.1-4.7, 0.1-4.6, 0.1-4.5, 0.1-4.4, 0.1-4.3, 0.1-4.2, 0.1-4.1, 0.1-4.0, 0.1-3.9, 0.1-3.8, 0.1-3.7, 0.1-3.6, 0.1-3.5, 0.1-3.4, 0.1-3.3, 0.1-3.2, 0.1-3.1, 0.1-3.0, 0.1-2.9, 0.1-2.8, 0.1-2.7, 0.1-2.6, 0.1-2.5, 0.1-2.4, 0.1-2.3, 0.1-2.2, 0.1-2.1, 0.1-2.0, 0.1-1.9, 0.1-1.8, 0.1-1.7, 0.1-1.6, 0.1-1.5, 0.1-1.4, 0.1-1.3, 0.1-1.2, 0.1-1.1, 0.1-1.0, 0.1-0.9, 0.1-0.8, 0.1-0.7, 0.1-0.6, 0.1-0.5, 0.1-0.4, 0.1-0.3, or 0.1-0.2 mM CaCl₂. In some embodiments, the diluent comprises at least 1.0, 1.1, 1.2, 1.3, 1.4, 1.5, 1.6, 1.7, 1.8, 1.9, 2.0, 2.1, 2.2, 2.3, 2.4, 2.5, 2.6, 2.7, 2.8, 2.9, 3.0, 3.1, 3.2, 3.3, 3.4, 3.5, 3.6, 3.7, 3.8, 3.9, or 4.0 mM CaCl₂. In some embodiments, the diluent comprises at most 1.0, 1.1, 1.2, 1.3, 1.4, 1.5, 1.6, 1.7, 1.8, 1.9, 2.0, 2.1, 2.2, 2.3, 2.4, 2.5, 2.6, 2.7, 2.8, 2.9, 3.0, 3.1, 3.2, 3.3, 3.4, 3.5, 3.6, 3.7, 3.8, 3.9, or 4.0 mM CaCl₂. In some embodiments, the diluent comprises 1.0, 1.1, 1.2, 1.3, 1.4, 1.5, 1.6, 1.7, 1.8, 1.9, 2.0, 2.1, 2.2, 2.3, 2.4, 2.5, 2.6, 2.7, 2.8, 2.9, 3.0, 3.1, 3.2, 3.3, 3.4, 3.5, 3.6, 3.7, 3.8, 3.9, or 4.0 mM CaCl₂.

[0606] In some embodiments, the diluent comprises 0.1-50 mM MgCl₂.

[0607] In some embodiments, the diluent comprises 0.1-50, 0.2-50, 0.3-50, 0.4-50, 0.5-50, 0.6-50, 0.7-50, 0.8-50, 0.9-50, 1.0-50, −50, 1.1-50, 1.2-50, 1.3-50, 1.4-50, 1.5-50, 1.6-50, 1.7-50, 1.8-50, 1.9-50, 2.0-50, 2.1-50, 2.2-50, 2.3-50, 2.4-50, 2.5-50, 2.6-50, 2.7-50, 2.8-50, 2.9-50, 3.0-50, 3.1-50, 3.2-50, 3.3-50, 3.4-50, 3.5-50, 3.6-50, 3.7-50, 3.8-50, 3.9-50, 4-50, 5-50, 6-50, 7-50, 8-50, 9-50, 10-50, 15-50, 20-50, 25-50, 1 30-50, 35-50, 40-50, or 45-50 mM MgCl₂. In some embodiments, the diluent comprises 0.1-45, 0.1-40, 0.1-35, 0.1-30, 0.1-25, 0.1-20, 0.1-15, 0.1-10, 0.1-5, 0.1-4, 0.1-4.9, 0.1-4.8, 0.1-4.7, 0.1-4.6, 0.1-4.5, 0.1-4.4, 0.1-4.3, 0.1-4.2, 0.1-4.1, 0.1-4.0, 0.1-3.9, 0.1-3.8, 0.1-3.7, 0.1-3.6, 0.1-3.5, 0.1-3.4, 0.1-3.3, 0.1-3.2, 0.1-3.1, 0.1-3.0, 0.1-2.9, 0.1-2.8, 0.1-2.7, 0.1-2.6, 0.1-2.5, 0.1-2.4, 0.1-2.3, 0.1-2.2, 0.1-2.1, 0.1-2.0, 0.1-1.9, 0.1-1.8, 0.1-1.7, 0.1-1.6, 0.1-1.5, 0.1-1.4, 0.1-1.3, 0.1-1.2, 0.1-1.1, 0.1-1.0, 0.1-0.9, 0.1-0.8, 0.1-0.7, 0.1-0.6, 0.1-0.5, 0.1-0.4, 0.1-0.3, or 0.1-0.2 mM MgCl₂. In some embodiments the diluent comprises at least 0.1, 0.2, 0.3, 0.4, 0.5, 0.6, 0.7, 0.8, 0.9, 1.0, 1.1, 1.2, 1.3, 1.4, 1.5, 1.6, 1.7, 1.8, 1.9, 2.0, 2.1, 2.2, 2.3, 2.4, 2.5, 2.6, 2.7, 2.8, 2.9, 3.0, 3.1, 3.2, 3.3, 3.4, 3.5, 3.6, 3.7, 3.8, 3.9, or 4.0 mM MgCl₂. In some embodiments, the diluent comprises at most 0.1, 0.2, 0.3, 0.4, 0.5, 0.6, 0.7, 0.8, 0.9, 1.0, 1.1, 1.2, 1.3, 1.4, 1.5, 1.6, 1.7, 1.8, 1.9, 2.0, 2.1, 2.2, 2.3, 2.4, 2.5, 2.6, 2.7, 2.8, 2.9, 3.0, 3.1, 3.2, 3.3, 3.4, 3.5, 3.6, 3.7, 3.8, 3.9, or 4.0 mM MgCl₂. In some embodiments, the diluent comprises 0.1, 0.2, 0.3, 0.4, 0.5, 0.6, 0.7, 0.8, 0.9, 1.0, 1.1, 1.2, 1.3, 1.4, 1.5, 1.6, 1.7, 1.8, 1.9, 2.0, 2.1, 2.2, 2.3, 2.4, 2.5, 2.6, 2.7, 2.8, 2.9, 3.0, 3.1, 3.2, 3.3, 3.4, 3.5, 3.6, 3.7, 3.8, 3.9, or 4.0 mM MgCl₂.

[0608] In some embodiments, the diluent comprises 1-100 mM NaHCO₃, 1-100 mM KHCO₃, or a combination thereof.

[0609] In some embodiments, the diluent comprises 1-100 mM NaHCO₃.

[0610] In some embodiments, the diluent comprises 1-99, 1-95, 1-90, 1-85, 1-80, 1-75, 1-70, 1-65, 1-60, 1-55, 1-50, 1-45, 1-40, 1-35, 1-30, 1-25, 1-20, 1-15, 1-10, 1-9, 1-8, 1-7, 1-6, 1-5, 1-4, 1-3, or 1-2 mM NaHCO₃. In some embodiments, the diluent comprises 2-100, 3-100, 4-100, 5-100, 6-100, 7-100, 8-100, 9-100, 10-100, 15-100, 20-100, 25-100, 30-100, 35-100, 40-100, 45-100, 50-100, 55-100, 60-100, 65-100, 70-100, 75-100, 80-100, 85-100, 90-100, or 95-100 mM NaHCO₃. In some embodiments, the diluent comprises 24.0-28.0, 24.0-27.9, 24.0-27.8, 24.0-27.7, 24.0-27.6, 24.0-27.5, 24.0-27.4, 24.0-27.3, 24.0-27.2, 24.0-27.1, 24.0-27.0, 24.0-26.9, 24.0-26.8, 24.0-26.7, 24.0-26.6, 24.0-26.5, 24.0-26.4, 24.0-26.3, 24.0-26.2, 24.0-26.1, 24.0-26.0, 24.0-25.9, 4.0-25.8, 24.0-25.7, 24.0-25.6, 24.0-25.5, 24.0-25.4, 24.0-25.3, 24.0-25.2, 24.0-25.1, 24.0-25.0, 24.0-24.9, 24.0-24.8, 24.0-24.7, 24.0-24.6, 24.0-24.5, 24.0-24.4, 24.0-24.3, 24.0-24.2, or 24.0-24.1 mM NaHCO₃. In some embodiments, the diluent comprises 24.1-28.0, 24.2-28.0, 24.3-28.0, 24.4-28.0, 24.5-28.0, 24.6-28.0, 24.7-28.0, 24.8-28.0, 24.9-28.0, 25.0-28.0, 25.1-28.0, 25.2-28.0, 25.3-28.0, 25.4-28.0, 25.5-28.0, 25.6-28.0, 25.7-28.0, 25.8-28.0, 25.9-28.0, 26.0-28.0, 26.1-28.0, 26.2-28.0, 26.3-28.0, 26.4-28.0, 26.5-28.0, 26.6-28.0, 26.7-28.0, 26.8-28.0, 26.9-28.0, 27.0-28.0, 27.1-28.0, 27.2-28.0, 27.3-28.0, 27.4-28.0, 27.5-28.0, 27.6-28.0, 27.7-28.0, 27.8-28.0, or 27.9-28.0 mM NaHCO₃. In some embodiments, the diluent comprises at least 24.0, 24.1, 24.2, 24.3, 24.4, 24.5, 24.6, 24.7, 24.8, 24.9, 25.0, 25.1, 25.2, 25.3, 25.4, 25.5, 25.6, 25.7, 25.8, 25.9, 26.0, 26.1, 26.2, 26.3, 26.4, 26.5, 26.6, 26.7, 26.8, 26.9, 27.0, 27.1, 27.2, 27.3, 27.4, 27.5, 27.6, 27.7, 27.8, 27.9, or 28.0 mM NaHCO₃. In some embodiments, the diluent comprises at most 24.0, 24.1, 24.2, 24.3, 24.4, 24.5, 24.6, 24.7, 24.8, 24.9, 25.0, 25.1, 25.2, 25.3, 25.4, 25.5, 25.6, 25.7, 25.8, 25.9, 26.1, 26.2, 26.3, 26.4, 26.5, 26.6, 26.7, 26.8, 26.9, 27.0, 27.1, 27.2, 27.3, 27.4, 27.5, 27.6, 27.7, 27.8, 27.9, or 28.0 mM NaHCO₃. In some embodiments, the diluent comprises 24.0, 24.1, 24.2, 24.3, 24.4, 24.5, 24.6, 24.7, 24.8, 24.9, 25.0, 25.1, 25.2, 25.3, 25.4, 25.5, 25.6, 25.7, 25.8, 25.9, 26.1, 26.2, 26.3, 26.4, 26.5, 26.6, 26.7, 26.8, 26.9, 27.0, 27.1, 27.2, 27.3, 27.4, 27.5, 27.6, 27.7, 27.8, 27.9, or 28.0 mM NaHCO₃.

[0611] In some embodiments, the diluent comprises 1-100 mM KHCO₃.

[0612] In some embodiments, the diluent comprises 1-99, 1-95, 1-90, 1-85, 1-80, 1-75, 1-70, 1-65, 1-60, 1-55, 1-50, 1-45, 1-40, 1-35, 1-30, 1-25, 1-20, 1-15, 1-10, 1-9, 1-8, 1-7, 1-6, 1-5, 1-4, 1-3, or 1-2 mM KHCO₃. In some embodiments, the diluent comprises 2-100, 3-100, 4-100, 5-100, 6-100, 7-100, 8-100, 9-100, 10-100, 15-100, 20-100, 25-100, 30-100, 35-100, 40-100, 45-100, 50-100, 55-100, 60-100, 65-100, 70-100, 75-100, 80-100, 85-100, 90-100, or 95-100 mM KHCO₃. In some embodiments, the diluent comprises 24.0-28.0, 24.0-27.9, 24.0-27.8, 24.0-27.7, 24.0-27.6, 24.0-27.5, 24.0-27.4, 24.0-27.3, 24.0-27.2, 24.0-27.1, 24.0-27.0, 24.0-26.9, 24.0-26.8, 24.0-26.7, 24.0-26.6, 24.0-26.5, 24.0-26.4, 24.0-26.3, 24.0-26.2, 24.0-26.1, 24.0-26.0, 24.0-25.9, 4.0-25.8, 24.0-25.7, 24.0-25.6, 24.0-25.5, 24.0-25.4, 24.0-25.3, 24.0-25.2, 24.0-25.1, 24.0-25.0, 24.0-24.9, 24.0-24.8, 24.0-24.7, 24.0-24.6, 24.0-24.5, 24.0-24.4, 24.0-24.3, 24.0-24.2, or 24.0-24.1 mM KHCO₃. In some embodiments, the diluent comprises 24.1-28.0, 24.2-28.0, 24.3-28.0, 24.4-28.0, 24.5-28.0, 24.6-28.0, 24.7-28.0, 24.8-28.0, 24.9-28.0, 25.0-28.0, 25.1-28.0, 25.2-28.0, 25.3-28.0, 25.4-28.0, 25.5-28.0, 25.6-28.0, 25.7-28.0, 25.8-28.0, 25.9-28.0, 26.0-28.0, 26.1-28.0, 26.2-28.0, 26.3-28.0, 26.4-28.0, 26.5-28.0, 26.6-28.0, 26.7-28.0, 26.8-28.0, 26.9-28.0, 27.0-28.0, 27.1-28.0, 27.2-28.0, 27.3-28.0, 27.4-28.0, 27.5-28.0, 27.6-28.0, 27.7-28.0, 27.8-28.0, or 27.9-28.0 mM KHCO₃. In some embodiments, the diluent comprises at least 24.0, 24.1, 24.2, 24.3, 24.4, 24.5, 24.6, 24.7, 24.8, 24.9, 25.0, 25.1, 25.2, 25.3, 25.4, 25.5, 25.6, 25.7, 25.8, 25.9, 26.0, 26.1, 26.2, 26.3, 26.4, 26.5, 26.6, 26.7, 26.8, 26.9, 27.0, 27.1, 27.2, 27.3, 27.4, 27.5, 27.6, 27.7, 27.8, 27.9, or 28.0 mM KHCO₃. In some embodiments, the diluent comprises at most 24.0, 24.1, 24.2, 24.3, 24.4, 24.5, 24.6, 24.7, 24.8, 24.9, 25.0, 25.1, 25.2, 25.3, 25.4, 25.5, 25.6, 25.7, 25.8, 25.9, 26.1, 26.2, 26.3, 26.4, 26.5, 26.6, 26.7, 26.8, 26.9, 27.0, 27.1, 27.2, 27.3, 27.4, 27.5, 27.6, 27.7, 27.8, 27.9, or 28.0 mM KHCO₃. In some embodiments, the diluent comprises 24.0, 24.1, 24.2, 24.3, 24.4, 24.5, 24.6, 24.7, 24.8, 24.9, 25.0, 25.1, 25.2, 25.3, 25.4, 25.5, 25.6, 25.7, 25.8, 25.9, 26.1, 26.2, 26.3, 26.4, 26.5, 26.6, 26.7, 26.8, 26.9, 27.0, 27.1, 27.2, 27.3, 27.4, 27.5, 27.6, 27.7, 27.8, 27.9, or 28.0 mM KHCO₃.

[0613] In some embodiments, the diluent comprises 1-100 mM D-glucose.

[0614] In some embodiments, the diluent comprises 1-100, 1-95, 1-90, 1-85, 1-80, 1-75, 1-70, 1-65, 1-60, 1-55, 1-50, 1-45, 1-40, 1-35, 1-30, 1-29, 1-28, 1-27, 1-26, 1-25, 1-24, 1-23, 1-22, 1-21, 1-20, 1-19, 1-18, 1-17, 1-16, 1-15, 1-14, 1-13, 1-12, 1-11, 1-10, 1-9, 1-8, 1-7, 1-6, 1-5, 1-4, 1-3, or 1-2 mM D-glucose. In some embodiments, the diluent comprises 2-100, 3-100, 4-100, 5-100, 6-100, 7-100, 8-100, 9-100, 10-100, 11-100, 12-100, 13-100, 14-100, 15-100, 16-100, 17-100, 18-100, 19-100, 20-100, 21-100, 22-100, 23-100, 24-100, 25-100, 26-100, 29-100, 28-100, 29-100, 30-100, 35-100, 40-100, 45-100, 50-100, 55-100, 60-100, 65-100, 70-100, 75-100, 80-100, 85-100, 90-100, or 95-100 mM D-glucose. In some embodiments, the diluent comprises 2-30, 3-30, 4-30, 5-30, 6-30, 7-30, 8-30, 9-30, 10-30, 11-30, 12-30, 13-30, 14-30, 15-30, 16-30, 17-30, 18-30, 19-30, 20-30, 21-30, 22-30, 23-30, 24-30, 25-30, 26-30, 27-30, 28-30, or 29-30 mM D-glucose. In some embodiments, the diluent comprises at least 1, 2, 3, 4, 5, 6, 7, 8, 9, 10, 11, 12, 13, 14, 15, 16, 17, 18, 19, 20, 21, 22, 23, 24, 25, 26, 27, 28, 29, or 30 mM D-glucose. In some embodiments, the diluent comprises at most 1, 2, 3, 4, 5, 6, 7, 8, 9, 10, 11, 12, 13, 14, 15, 16, 17, 18, 19, 20, 21, 22, 23, 24, 25, 26, 27, 28, 29, or 30 mM D-glucose. In some embodiments, the diluent comprises 1, 2, 3, 4, 5, 6, 7, 8, 9, 10, 11, 12, 13, 14, 15, 16, 17, 18, 19, 20, 21, 22, 23, 24, 25, 26, 27, 28, 29, or 30 mM D-glucose.

[0615] In some embodiments, the diluent comprises 1-100, 1-95, 1-90, 1-85, 1-80, 1-75, 1-70, 1-65, 1-60, 1-55, 1-50, 1-45, 1-40, 1-35, 1-30, 1-29, 1-28, 1-27, 1-26, 1-25, 1-24, 1-23, 1-22, 1-21, 1-20, 1-19, 1-18, 1-17, 1-16, 1-15, 1-14, 1-13, 1-12, 1-11, 1-10, 1-9, 1-8, 1-7, 1-6, 1-5, 1-4, 1-3, or 1-2 mM glucose. In some embodiments, the diluent comprises 2-100, 3-100, 4-100, 5-100, 6-100, 7-100, 8-100, 9-100, 10-100, 11-100, 12-100, 13-100, 14-100, 15-100, 16-100, 17-100, 18-100, 19-100, 20-100,21-100, 22-100,23-100, 24-100,25-100, 26-100, 29-100, 28-100, 29-100, 30-100, 35-100, 40-100, 45-100, 50-100, 55-100, 60-100, 65-100, 70-100, 75-100, 80-100, 85-100, 90-100, or 95-100 mM glucose. In some embodiments, the diluent comprises 2-30, 3-30, 4-30, 5-30, 6-30, 7-30, 8-30, 9-30, 10-30, 11-30, 12-30, 13-30, 14-30, 15-30, 16-30, 17-30, 18-30, 19-30, 20-30, 21-30, 22-30, 23-30, 24-30, 25-30, 26-30, 27-30, 28-30, or 29-30 mM glucose. In some embodiments, the diluent comprises at least 1, 2, 3, 4, 5, 6, 7, 8, 9, 10, 11, 12, 13, 14, 15, 16, 17, 18, 19, 20, 21, 22, 23, 24, 25, 26, 27, 28, 29, or 30 mM glucose. In some embodiments, the diluent comprises at most 1, 2, 3, 4, 5, 6, 7, 8, 9, 10, 11, 12, 13, 14, 15, 16, 17, 18, 19, 20, 21, 22, 23, 24, 25, 26, 27, 28, 29, or 30 mM glucose. In some embodiments, the diluent comprises 1, 2, 3, 4, 5, 6, 7, 8, 9, 10, 11, 12, 13, 14, 15, 16, 17, 18, 19, 20, 21, 22, 23, 24, 25, 26, 27, 28, 29, or 30 mM glucose.

[0616] In some embodiments, the diluent comprises 25-250 mM NaCl, 0.1-20 mM KCl, 0.1-50 mM Na₂HPO₄, 0.1-50 mM NaH₂PO₄, 0.1-50 mM CaCl₂, and 0.1-50 mM MgCl₂.

[0617] In some embodiments, the diluent comprises 150 mM NaCl, 3.0 mM KCl, 0.7 mM Na₂HPO₄, 0.3 mM NaH₂PO₄, 0.79 mM MgCl₂, and 1.4 mM CaCl₂.

[0618] In some embodiments, the diluent further comprises an antioxidant. In some embodiments, the antioxidant is t-butylhydroxyquinoline (TBHQ), buylated hydroxytolune (BHT), butylated hydroxyanisole (BHA), vitamin E, or any combination thereof. In some embodiments, the ASO is solubilized or diluted in a buffer further comprising an antioxidant, wherein the antioxidant is ascorbic acid (vitamin C), glutathione, lipoic acid, uric acid, carotenes, α-tocopherol (vitamin E), ubiquinol (coenzyme Q), or any combination thereof.

[0619] In some embodiments, the diluent comprises 25-250 mM NaCl, 0.1-20 mM KCl, 0-50 mM KH2PO4, 1-100 mM NaHCO₃, 0-50 mM NaH2PO4, 1-100 mM D-glucose, 0.1-50 mM CaCl₂, 0.1-50 mM MgCl₂, or any combinations thereof.

[0620] In some embodiments, the diluent comprises 25-250 mM NaCl, 0.1-20 mM KCl, 0-50 mM KH2PO4, 1-100 mM NaHCO₃, 0-50 mM NaH2PO4, 1-100 mM D-glucose, 0.1-50 mM CaCl₂, and 0.1-50 mM MgCl₂.

[0621] In some embodiments, the diluent comprises 127 mM NaCl, 1.0 mM KCl, 1.2 mM KH₂PO₄, 26 mM NaHCO₃, 10 mM D-glucose, 2.4 mM CaCl₂, and 1.3 mM MgCl₂.

[0622] In some embodiments, the diluent comprises 119 mM NaCl, 26.2 mM NaHCO₃, 2.5 mM KCl, 1 mM NaH₂PO₄, 1.3 mM MgCl₂, 10 mM glucose, and 2.5 mM CaCl₂.

[0623] In some embodiments, the diluent does not comprise a preservative. In some embodiments, the diluent comprises a preservative.

[0624] In some embodiments, the instructions for diluting or solubilizing the ASO as described herein in the diluent comprise instructions for diluting or solubilizing the ASO as described herein to a concentration of from 5-200 mg/mL in the diluent.

[0625] In some embodiments, the instructions for diluting or solubilizing the ASO as described herein in the diluent comprise instructions for diluting or solubilizing the ASO as described herein to a concentration of from 5-250, 5-247.5, 5-245, 5-242.5, 5-240, 5-237.5, 5-235, 5-232.5, 5-230, 5-227.5, 5-225, 5-225.5, 5-220, 5-217.5, 5-215, 5-212.5, 5-210, 5-205.5, 5-205, 5-202.5, 5-200, 5-197.5, 5-195, 5-192.5, 5-190, 5-187.5, 5-185, 5-182.5, 5-180, 5-177.5, 5-175, 5-172.5, 5-170, 5-167.5, 5-165, 5-162.5, 5-160, 5-157.5, 5-155, 5-152.5, 5-150, 5-147.5, 5-145, 5-142.5, 5-140, 5-137.5, 5-135, 5-132.5, 5-130, 5-127.5, 5-125, 5-122.5, 5-120, 5-117.5, 5-115, 5-112.5, 5-110, 5-107.5, 5-105, 5-102.5, 5-100, 5-97.5, 5-95, 5-92.5, 5-90, 5-87.5, 5-85, 5-82.5, 5-80, 5-77.5, 5-75, 5-72.5, 5-70, 5-67.5, 5-65, 5-62.5, 5-60, 5-57.5, 5-55, 5-52.5, 5-50, 5-47.5, 5-45, 5-42.5, 5-40, 5-37.5, 5-35, 5-32.5, 5-30, 5-27.5, 5-25, 5-22.5, 5-20, 5-17.5, 5-15, 5-12.5, or 5-10 mg/mL in the diluent. In some embodiments, the instructions for diluting or solubilizing the ASO as described herein in the diluent comprise instructions for diluting or solubilizing the ASO as described herein to a concentration of from 10-250, 15-250, 20-250, 25-250, 30-250, 35-250, 40-250, 45-250, 50-250, 55-250, 60-250, 65-250, 70-250, 75-250, 80-250, 85-250, 90-250, 95-250, 100-250, 105-250, 110-250, 115-250, 120-250, 125-250, 130-250, 135-250, 140-250, 145-250, 150-250, 155-250, 160-250, 165-250, 170-250, 175-250, 180-250, 185-250, 190-250, or 195-250, 200-250, 205-250, 210-250, 215-250, 220-250, 225-250, 230-250, 235-250, 240-250, or 245-250 mg/mL in the diluent. In some embodiments, the instructions for diluting or solubilizing the ASO as described herein in the diluent comprise instructions for diluting or solubilizing the ASO as described herein to a concentration of from at least 1, 2, 3, 4, 5, 6, 7, 8, 9, 10, 11, 12, 13, 14, 15, 16, 17, 18, 19, 20, 21, 22, 23, 24, 25, 26, 27, 28, 29, 30, 31, 32, 33, 34, 35, 36, 37, 38, 39, 40, 41, 42, 43, 44, 45, 46, 47, 48, 49, 50, 51, 52, 53, 54, 55, 56, 57, 58, 59, 60, 61, 62, 63, 64, 65, 66, 67, 68, 69, 70, 71, 72, 73, 74, 75, 76, 77, 78, 79, 80, 81, 82, 83, 84, 85, 86, 87, 88, 89, 90, 91, 92, 93, 94, 95, 96, 97, 98, 99, 100, 101, 102, 103, 104, 105, 106, 107, 108, 109, 110, 111, 112, 113, 114, 115, 116, 117, 118, 119, 120, 121, 122, 123, 124, 125, 126, 127, 128, 129, 130, 131, 132, 133, 134, 135, 136, 137, 138, 139, 140, 141, 142, 143, 144, 145, 146, 147, 148, 149, 150, 151, 152, 153, 154, 155, 156, 157, 158, 159, 160, 161, 162, 163, 164, 165, 166, 167, 168, 169, 170, 171, 172, 173, 174, 175, 176, 177, 178, 179, 180, 181, 182, 183, 184, 185, 186, 187, 188, 189, 190, 191, 192, 193, 194, 195, 196, 197, 198, 199, 200, 210, 211, 212, 213, 214, 215, 216, 217, 218, 219, 220, 221, 222, 223, 224, 225, 226, 227, 228, 229, 230, 231, 232, 233, 234, 235, 236, 237, 238, 239, 240, 241, 242, 243, 244, 245, 246, 247, 248, 249, or 250 mg/mL in the diluent. In some embodiments, the instructions for diluting or solubilizing the ASO as described herein in the diluent comprise instructions for diluting or solubilizing the ASO as described herein to a concentration of from at most 1, 2, 3, 4, 5, 6, 7, 8, 9, 10, 11, 12, 13, 14, 15, 16, 17, 18, 19, 20, 21, 22, 23, 24, 25, 26, 27, 28, 29, 30, 31, 32, 33, 34, 35, 36, 37, 38, 39, 40, 41, 42, 43, 44, 45, 46, 47, 48, 49, 50, 51, 52, 53, 54, 55, 56, 57, 58, 59, 60, 61, 62, 63, 64, 65, 66, 67, 68, 69, 70, 71, 72, 73, 74, 75, 76, 77, 78, 79, 80, 81, 82, 83, 84, 85, 86, 87, 88, 89, 90, 91, 92, 93, 94, 95, 96, 97, 98, 99, 100, 101, 102, 103, 104, 105, 106, 107, 108, 109, 110, 111, 112, 113, 114, 115, 116, 117, 118, 119, 120, 121, 122, 123, 124, 125, 126, 127, 128, 129, 130, 131, 132, 133, 134, 135, 136, 137, 138, 139, 140, 141, 142, 143, 144, 145, 146, 147, 148, 149, 150, 151, 152, 153, 154, 155, 156, 157, 158, 159, 160, 161, 162, 163, 164, 165, 166, 167, 168, 169, 170, 171, 172, 173, 174, 175, 176, 177, 178, 179, 180, 181, 182, 183, 184, 185, 186, 187, 188, 189, 190, 191, 192, 193, 194, 195, 196, 197, 198, 199, 200, 210, 211, 212, 213, 214, 215, 216, 217, 218, 219, 220, 221, 222, 223, 224, 225, 226, 227, 228, 229, 230, 231, 232, 233, 234, 235, 236, 237, 238, 239, 240, 241, 242, 243, 244, 245, 246, 247, 248, 249, or 250 mg/mL in the diluent. In some embodiments, the instructions for diluting or solubilizing the ASO as described herein in the diluent comprise instructions for diluting or solubilizing the ASO as described herein to a concentration of from 1, 2, 3, 4, 5, 6, 7, 8, 9, 10, 11, 12, 13, 14, 15, 16, 17, 18, 19, 20, 21, 22, 23, 24, 25, 26, 27, 28, 29, 30, 31, 32, 33, 34, 35, 36, 37, 38, 39, 40, 41, 42, 43, 44, 45, 46, 47, 48, 49, 50, 51, 52, 53, 54, 55, 56, 57, 58, 59, 60, 61, 62, 63, 64, 65, 66, 67, 68, 69, 70, 71, 72, 73, 74, 75, 76, 77, 78, 79, 80, 81, 82, 83, 84, 85, 86, 87, 88, 89, 90, 91, 92, 93, 94, 95, 96, 97, 98, 99, 100, 101, 102, 103, 104, 105, 106, 107, 108, 109, 110, 111, 112, 113, 114, 115, 116, 117, 118, 119, 120, 121, 122, 123, 124, 125, 126, 127, 128, 129, 130, 131, 132, 133, 134, 135, 136, 137, 138, 139, 140, 141, 142, 143, 144, 145, 146, 147, 148, 149, 150, 151, 152, 153, 154, 155, 156, 157, 158, 159, 160, 161, 162, 163, 164, 165, 166, 167, 168, 169, 170, 171, 172, 173, 174, 175, 176, 177, 178, 179, 180, 181, 182, 183, 184, 185, 186, 187, 188, 189, 190, 191, 192, 193, 194, 195, 196, 197, 198, 199, 200, 210, 211, 212, 213, 214, 215, 216, 217, 218, 219, 220, 221, 222, 223, 224, 225, 226, 227, 228, 229, 230, 231, 232, 233, 234, 235, 236, 237, 238, 239, 240, 241, 242, 243, 244, 245, 246, 247, 248, 249, or 250 mg/mL in the diluent.

[0626] In some embodiments, the ASO as described herein is present in the pharmaceutical composition at a concentration of the ASO is present in the pharmaceutical composition at a concentration of from 0.1 mg/mL to 250 mg/mL. In some embodiments, the ASO as described herein is present in the pharmaceutical composition at a concentration of about 0.1 mg/mL, 0.5 mg/mL, 1 mg/mL, 2 mg/mL, 2.5 mg/mL, 3 mg/mL, 4 mg/mL, 5 mg/mL, 6 mg/mL, 7 mg/mL, 8 mg/mL, 9 mg/mL, 10 mg/mL, 11 mg/mL, 12 mg/mL, 13 mg/mL, 14 mg/mL, 15 mg/mL, 16 mg/mL, 17 mg/mL, 18 mg/mL, 19 mg/mL, or 20 mg/mL. In some embodiments, the ASO as described herein is present in the pharmaceutical composition at a concentration of about 30 mg/mL, 40 mg/mL, 50 mg/mL, 60 mg/mL, 70 mg/mL, 80 mg/mL, 90 mg/mL, 100 mg/mL, 110 mg/mL, 120 mg/mL, 130 mg/mL, 140 mg/mL, 150 mg/mL, 160 mg/mL, 170 mg/mL, 180 mg/mL, 190 mg/mL, or 200 mg/mL. In some embodiments, the ASO is present in the pharmaceutical composition at a concentration of about 22.5 mg/mL, 25 mg/mL, 27.5 mg/mL, 30 mg/mL, 32.5 mg/mL, 35 mg/mL, 37.5 mg/mL, 40 mg/mL, 42.5 mg/mL, 45 mg/mL, 47.5 mg/mL, 50 mg/mL, 52.5 mg/mL, 55 mg/mL, 57.5 mg/mL, 60 mg/mL, 62.5 mg/mL, 65 mg/mL, 67.5 mg/mL, 70 mg/mL, 72.5 mg/mL, 75 mg/mL, 77.5 mg/mL, 80 mg/mL, 82.5 mg/mL, 85 mg/mL, 87.5 mg/mL, 90 mg/mL, 92.5 mg/mL, 95 mg/mL, 97.5 mg/mL, 100 mg/mL, 102.5 mg/mL, 105 mg/mL, 107.5 mg/mL, 110 mg/mL, 112.5 mg/mL, 115 mg/mL, 117.5 mg/mL, 120 mg/mL, 122.5 mg/mL, 125 mg/mL, 127.5 mg/mL, 130 mg/mL, 132.5 mg/mL, 135 mg/mL, 137.5 mg/mL, 140 mg/mL, 142.5 mg/mL, 145 mg/mL, 147.5 mg/mL, 150 mg/mL, 152.5 mg/mL, 155 mg/mL, 157.5 mg/mL, 160 mg/mL, 162.5 mg/mL, 165 mg/mL, 167.5 mg/mL, 170 mg/mL, 172.5 mg/mL, 175 mg/mL, 177.5 mg/mL, 180 mg/mL, 182.5 mg/mL, 185 mg/mL, 187.5 mg/mL, 190 mg/mL, 192.5 mg/mL, 195 mg/mL, 197.5 mg/mL, 200 mg/mL, 202.5 mg/mL, 205 mg/mL, 207.5 mg/mL, 210 mg/mL, 212.5 mg/mL, 215 mg/mL, 217.5 mg/mL, 220 mg/mL, 222.5 mg/mL, 225 mg/mL, 227.5 mg/mL, 230 mg/mL, 232.5 mg/mL, 235 mg/mL, 237.5 mg/mL, 240 mg/mL, 242.5 mg/mL, 245 mg/mL, 247.5 mg/mL, or 250 mg/mL. In some embodiments, the ASO as described herein is solubilized or diluted to a concentration of 11 mg/mL, 22 mg/mL, 33 mg/mL, 44 mg/mL, 55 mg/mL, 66 mg/mL, 77 mg/mL, 88 mg/mL, 99 mg/mL, or 100 mg/mL in the diluent.

[0627] In some embodiments, the ASO as described herein is present in the pharmaceutical composition at a concentration of from 0.1 mg/mL to 250 mg/mL, from 0.2 mg/mL to 250 mg/mL, from 0.3 mg/mL to 250 mg/mL, from 0.4 mg/mL to 250 mg/mL, from 0.5 mg/mL to 250 mg/mL, from 0.6 mg/mL to 250 mg/mL, from 0.7 mg/mL to 250 mg/mL, from 0.8 mg/mL to 250 mg/mL, from 0.9 mg/mL to 250 mg/mL, from 1.0 mg/mL to 250 mg/mL, from 1.1 mg/mL to 250 mg/mL, from 1.2 mg/mL to 250 mg/mL, from 1.3 mg/mL to 250 mg/mL, from 1.4 mg/mL to 250 mg/mL, from 1.5 mg/mL to 250 mg/mL, from 1.6 mg/mL to 250 mg/mL, from 1.7 mg/mL to 250 mg/mL, from 1.8 mg/mL to 250 mg/mL, from 1.9 mg/mL to 250 mg/mL, from 2.0 mg/mL to 250 mg/mL, from 2.1 mg/mL to 250 mg/mL, from 2.2 mg/mL to 250 mg/mL, from 2.3 mg/mL to 250 mg/mL, from 2.4 mg/mL to 250 mg/mL, from 2.5 mg/mL to 250 mg/mL, from 2.6 mg/mL to 250 mg/mL, from 2.7 mg/mL to 250 mg/mL, from 2.8 mg/mL to 250 mg/mL, from 2.9 mg/mL to 250 mg/mL, from 3.0 mg/mL to 250 mg/mL, from 3.1 mg/mL to 250 mg/mL, from 3.2 mg/mL to 250 mg/mL, from 3.3 mg/mL to 250 mg/mL, from 3.4 mg/mL to 250 mg/mL, from 3.5 mg/mL to 250 mg/mL, from 3.6 mg/mL to 250 mg/mL, from 3.7 mg/mL to 250 mg/mL, from 3.8 mg/mL to 250 mg/mL, from 3.9 mg/mL to 250 mg/mL, from 4.0 mg/mL to 250 mg/mL, from 5.0 mg/mL to 250 mg/mL, from 6.0 mg/mL to 250 mg/mL, from 7.0 mg/mL to 250 mg/mL, from 8.0 mg/mL to 250 mg/mL, from 9.0 mg/mL to 250 mg/mL, from 10 mg/mL to 250 mg/mL, from 15 mg/mL to 250 mg/mL, from 20 mg/mL to 250 mg/mL, from 25 mg/mL to 250 mg/mL, from 30 mg/mL to 250 mg/mL, from 35 mg/mL to 250 mg/mL, from 40 mg/mL to 250 mg/mL, from 45 mg/mL to 250 mg/mL, from 50 mg/mL to 250 mg/mL, from 55 mg/mL to 250 mg/mL, from 60 mg/mL to 250 mg/mL, from 65 mg/mL to 250 mg/mL, from 70 mg/mL to 250 mg/mL, from 75 mg/mL to 250 mg/mL, from 80 mg/mL to 250 mg/mL, from 85 mg/mL to 250 mg/mL, from 90 mg/mL to 250 mg/mL, from 95 mg/mL to 250 mg/mL, from 100 mg/mL to 250 mg/mL, from 105 mg/mL to 250 mg/mL, from 110 mg/mL to 250 mg/mL, from 115 mg/mL to 250 mg/mL, from 120 mg/mL to 250 mg/mL, from 125 mg/mL to 250 mg/mL, from 130 mg/mL to 250 mg/mL, from 135 mg/mL to 250 mg/mL, from 140 mg/mL to 250 mg/mL, from 145 mg/mL to 250 mg/mL, from 150 mg/mL to 250 mg/mL, from 155 mg/mL to 250 mg/mL, from 160 mg/mL to 250 mg/mL, from 165 mg/mL to 250 mg/mL, from 170 mg/mL to 250 mg/mL, from 175 mg/mL to 250 mg/mL, from 180 mg/mL to 250 mg/mL, from 185 mg/mL to 250 mg/mL, from 190 mg/mL to 250 mg/mL, from 195 mg/mL to 250 mg/mL, 200 mg/mL to 250 mg/mL, from 205 mg/mL to 250 mg/mL, from 210 mg/mL to 250 mg/mL, from 215 mg/mL to 250 mg/mL, from 220 mg/mL to 250 mg/mL, from 225 mg/mL to 250 mg/mL, from 230 mg/mL to 250 mg/mL, from 235 mg/mL to 250 mg/mL, from 240 mg/mL to 250 mg/mL, or from 245 mg/mL to 250 mg/mL.

[0628] In some embodiments, the ASO as described herein is present in the pharmaceutical composition at a concentration of from 0.1 mg/mL to 250 mg/mL, from 0.1 mg/mL to 245 mg/mL, from 0.1 mg/mL to 240 mg/mL, from 0.1 mg/mL to 235 mg/mL, from 0.1 mg/mL to 230 mg/mL, from 0.1 mg/mL to 225 mg/mL, from 0.1 mg/mL to 220 mg/mL, from 0.1 mg/mL to 215 mg/mL, from 0.1 mg/mL to 210 mg/mL, from 0.1 mg/mL to 205 mg/mL, from 0.1 mg/mL to 200 mg/mL, from 0.1 mg/mL to 195 mg/mL, from 0.1 mg/mL to 190 mg/mL, from 0.1 mg/mL to 185 mg/mL, from 0.1 mg/mL to 180 mg/mL, from 0.1 mg/mL to 175 mg/mL, from 0.1 mg/mL to 170 mg/mL, from 0.1 mg/mL to 165 mg/mL, from 0.1 mg/mL to 160 mg/mL, from 0.1 mg/mL to 155 mg/mL, from 0.1 mg/mL to 150 mg/mL, from 0.1 mg/mL to 145 mg/mL, from 0.1 mg/mL to 140 mg/mL, from 0.1 mg/mL to 135 mg/mL, from 0.1 mg/mL to 130 mg/mL, from 0.1 mg/mL to 125 mg/mL, from 0.1 mg/mL to 120 mg/mL, from 0.1 mg/mL to 115 mg/mL, from 0.1 mg/mL to 110 mg/mL, from 0.1 mg/mL to 100 mg/mL, from 0.1 mg/mL to 95 mg/mL, from 0.1 mg/mL to 90 mg/mL, from 0.1 mg/mL to 85 mg/mL, from 0.1 mg/mL to 80 mg/mL, from 0.1 mg/mL to 75 mg/mL, from 0.1 mg/mL to 70 mg/mL, from 0.1 mg/mL to 65 mg/mL, from 0.1 mg/mL to 60 mg/mL, from 0.1 mg/mL to 55 mg/mL, from 0.1 mg/mL to 50 mg/mL, from 0.1 mg/mL to 45 mg/mL, from 0.1 mg/mL to 40 mg/mL, from 0.1 mg/mL to 35 mg/mL, from 0.1 mg/mL to 30 mg/mL, from 0.1 mg/mL to 25 mg/mL, from 0.1 mg/mL to 20 mg/mL, from 0.1 mg/mL to 15 mg/mL, from 0.1 mg/mL to 10 mg/mL, from 0.1 mg/mL to 9 mg/mL, from 0.1 mg/mL to 8 mg/mL, from 0.1 mg/mL to 7 mg/mL, from 0.1 mg/mL to 6 mg/mL, from 0.1 mg/mL to 5 mg/mL, from 0.1 mg/mL to 4 mg/mL, from 0.1 mg/mL to 3.9 mg/mL, from 0.1 mg/mL to 3.8 mg/mL, from 0.1 mg/mL to 3.7 mg/mL, from 0.1 mg/mL to 3.6 mg/mL, from 0.1 mg/mL to 3.5 mg/mL, from 0.1 mg/mL to 3.4 mg/mL, from 0.1 mg/mL to 3.3 mg/mL, from 0.1 mg/mL to 3.2 mg/mL, from 0.1 mg/mL to 3.1 mg/mL, from 0.1 mg/mL to 3.0 mg/mL, from 0.1 mg/mL to 2.9 mg/mL, from 0.1 mg/mL to 2.8 mg/mL, from 0.1 mg/mL to 2.7 mg/mL, from 0.1 mg/mL to 2.6 mg/mL, from 0.1 mg/mL to 2.5 mg/mL, from 0.1 mg/mL to 2.4 mg/mL, from 0.1 mg/mL to 2.3 mg/mL, from 0.1 mg/mL to 2.2 mg/mL, from 0.1 mg/mL to 2.1 mg/mL, from 0.1 mg/mL to 2.0 mg/mL, from 0.1 mg/mL to 1.9 mg/mL, from 0.1 mg/mL to 1.8 mg/mL, from 0.1 mg/mL to 1.7 mg/mL, from 0.1 mg/mL to 1.6 mg/mL, from 0.1 mg/mL to 1.5 mg/mL, from 0.1 mg/mL to 1.4 mg/mL, from 0.1 mg/mL to 1.3 mg/mL, from 0.1 mg/mL to 1.2 mg/mL, from 0.1 mg/mL to 1.1 mg/mL, from 0.1 mg/mL to 1.0 mg/mL, from 0.1 mg/mL to 0.9 mg/mL, from 0.1 mg/mL to 0.8 mg/mL, from 0.1 mg/mL to 0.7 mg/mL, from 0.1 mg/mL to 0.6 mg/mL, from 0.1 mg/mL to 0.5 mg/mL, from 0.1 mg/mL to 0.4 mg/mL, from 0.1 mg/mL to 0.3 mg/mL, or from 0.1 mg/mL to 0.2 mg/mL.

[0629] In some embodiments, the ASO as described herein is solubilized or diluted to a concentration of at least 0.1, 0.2, 0.3, 0.4, 0.5, 0.6, 0.7, 0.8, 0.9, 1.0, 1.1, 1.2, 1.3, 1.4, 1.5, 1.6, 1.7, 1.8, 1.9, 2.0, 2.1, 2.2, 2.3, 2.4, 2.5, 2.6, 2.7, 2.8, 2.9, 3.0, 3.1, 3.2, 3.3, 3.4, 3.5, 3.6, 3.7, 3.8, 3.9, 4.0, 4.1, 4.2, 4.3, 4.4, 4.5, 4.6, 4.7, 4.8, 4.9, 5, 6, 7, 8, 9, 10, 11, 12, 13, 14, 15, 16, 17, 18, 19, 20, 21, 22, 23, 24, 25, 26, 27, 28, 29, 30, 31, 32, 33, 34, 35, 36, 37, 38, 39, 40, 41, 42, 43, 44, 45, 46, 47, 48, 49, 50, 51, 52, 53, 54, 55, 56, 57, 58, 59, 60, 61, 62, 63, 64, 65, 66, 67, 68, 69, 70, 71, 72, 73, 74, 75, 76, 77, 78, 79, 80, 81, 82, 83, 84, 85, 86, 87, 88, 89, 90, 91, 92, 93, 94, 95, 96, 97, 98, 99, 100, 101, 102, 103, 104, 105, 106, 107, 108, 109, 110, 111, 112, 113, 114, 115, 116, 117, 118, 119, 120, 121, 122, 123, 124, 125, 126, 127, 128, 129, 130, 131, 132, 133, 134, 135, 136, 137, 138, 139, 140, 141, 142, 143, 144, 145, 146, 147, 148, 149, 150, 151, 152, 153, 154, 155, 156, 157, 158, 159, 160, 161, 162, 163, 164, 165, 166, 167, 168, 169, 170, 171, 172, 173, 174, 175, 176, 177, 178, 179, 180, 181, 182, 183, 184, 185, 186, 187, 188, 189, 190, 191, 192, 193, 194, 195, 196, 197, 198, 199, 200, 210, 211, 212, 213, 214, 215, 216, 217, 218, 219, 220, 221, 222, 223, 224, 225, 226, 227, 228, 229, 230, 231, 232, 233, 234, 235, 236, 237, 238, 239, 240, 241, 242, 243, 244, 245, 246, 247, 248, 249, or 250 mg/mL in the diluent. In some embodiments, the ASO as described herein is solubilized or diluted to a concentration of at most 0.1, 0.2, 0.3, 0.4, 0.5, 0.6, 0.7, 0.8, 0.9, 1.0, 1.1, 1.2, 1.3, 1.4, 1.5, 1.6, 1.7, 1.8, 1.9, 2.0, 2.1, 2.2, 2.3, 2.4, 2.5, 2.6, 2.7, 2.8, 2.9, 3.0, 3.1, 3.2, 3.3, 3.4, 3.5, 3.6, 3.7, 3.8, 3.9, 4.0, 4.1, 4.2, 4.3, 4.4, 4.5, 4.6, 4.7, 4.8, 4.9, 5, 6, 7, 8, 9, 10, 11, 12, 13, 14, 15, 16, 17, 18, 19, 20, 21, 22, 23, 24, 25, 26, 27, 28, 29, 30, 31, 32, 33, 34, 35, 36, 37, 38, 39, 40, 41, 42, 43, 44, 45, 46, 47, 48, 49, 50, 51, 52, 53, 54, 55, 56, 57, 58, 59, 60, 61, 62, 63, 64, 65, 66, 67, 68, 69, 70, 71, 72, 73, 74, 75, 76, 77, 78, 79, 80, 81, 82, 83, 84, 85, 86, 87, 88, 89, 90, 91, 92, 93, 94, 95, 96, 97, 98, 99, 100, 101, 102, 103, 104, 105, 106, 107, 108, 109, 110, 111, 112, 113, 114, 115, 116, 117, 118, 119, 120, 121, 122, 123, 124, 125, 126, 127, 128, 129, 130, 131, 132, 133, 134, 135, 136, 137, 138, 139, 140, 141, 142, 143, 144, 145, 146, 147, 148, 149, 150, 151, 152, 153, 154, 155, 156, 157, 158, 159, 160, 161, 162, 163, 164, 165, 166, 167, 168, 169, 170, 171, 172, 173, 174, 175, 176, 177, 178, 179, 180, 181, 182, 183, 184, 185, 186, 187, 188, 189, 190, 191, 192, 193, 194, 195, 196, 197, 198, 199, 200, 210, 211, 212, 213, 214, 215, 216, 217, 218, 219, 220, 221, 222, 223, 224, 225, 226, 227, 228, 229, 230, 231, 232, 233, 234, 235, 236, 237, 238, 239, 240, 241, 242, 243, 244, 245, 246, 247, 248, 249, or 250 mg/mL in the diluent. In some embodiments, the ASO as described herein is solubilized or diluted to a concentration of 0.1, 0.2, 0.3, 0.4, 0.5, 0.6, 0.7, 0.8, 0.9, 1.0, 1.1, 1.2, 1.3, 1.4, 1.5, 1.6, 1.7, 1.8, 1.9, 2.0, 2.1, 2.2, 2.3, 2.4, 2.5, 2.6, 2.7, 2.8, 2.9, 3.0, 3.1, 3.2, 3.3, 3.4, 3.5, 3.6, 3.7, 3.8, 3.9, 4.0, 4.1, 4.2, 4.3, 4.4, 4.5, 4.6, 4.7, 4.8, 4.9, 5, 6, 7, 8, 9, 10, 11, 12, 13, 14, 15, 16, 17, 18, 19, 20, 21, 22, 23, 24, 25, 26, 27, 28, 29, 30, 31, 32, 33, 34, 35, 36, 37, 38, 39, 40, 41, 42, 43, 44, 45, 46, 47, 48, 49, 50, 51, 52, 53, 54, 55, 56, 57, 58, 59, 60, 61, 62, 63, 64, 65, 66, 67, 68, 69, 70, 71, 72, 73, 74, 75, 76, 77, 78, 79, 80, 81, 82, 83, 84, 85, 86, 87, 88, 89, 90, 91, 92, 93, 94, 95, 96, 97, 98, 99, 100, 101, 102, 103, 104, 105, 106, 107, 108, 109, 110, 111, 112, 113, 114, 115, 116, 117, 118, 119, 120, 121, 122, 123, 124, 125, 126, 127, 128, 129, 130, 131, 132, 133, 134, 135, 136, 137, 138, 139, 140, 141, 142, 143, 144, 145, 146, 147, 148, 149, 150, 151, 152, 153, 154, 155, 156, 157, 158, 159, 160, 161, 162, 163, 164, 165, 166, 167, 168, 169, 170, 171, 172, 173, 174, 175, 176, 177, 178, 179, 180, 181, 182, 183, 184, 185, 186, 187, 188, 189, 190, 191, 192, 193, 194, 195, 196, 197, 198, 199, 200, 210, 211, 212, 213, 214, 215, 216, 217, 218, 219, 220, 221, 222, 223, 224, 225, 226, 227, 228, 229, 230, 231, 232, 233, 234, 235, 236, 237, 238, 239, 240, 241, 242, 243, 244, 245, 246, 247, 248, 249, or 250 mg/mL in the diluent.

[0630] In some embodiments, the instructions for diluting or solubilizing the ASO as described herein in the diluent comprise instructions for diluting or solubilizing the ASO as described herein to a concentration of from 0.1 mg/mL to 200 mg/mL. In some embodiments, the instructions for diluting or solubilizing the ASO as described herein in the diluent comprise instructions for diluting or solubilizing the ASO as described herein to a concentration of about 0.1 mg/mL, 0.5 mg/mL, 1 mg/mL, 2 mg/mL, 2.5 mg/mL, 3 mg/mL, 4 mg/mL, 5 mg/mL, 6 mg/mL, 7 mg/mL, 8 mg/mL, 9 mg/mL, 10 mg/mL, 11 mg/mL, 12 mg/mL, 13 mg/mL, 14 mg/mL, 15 mg/mL, 16 mg/mL, 17 mg/mL, 18 mg/mL, 19 mg/mL, or 20 mg/mL. In some embodiments, the instructions for diluting or solubilizing the ASO as described herein in the diluent comprise instructions for diluting or solubilizing the ASO as described herein to a concentration of about 30 mg/mL, 40 mg/mL, 50 mg/mL, 60 mg/mL, 70 mg/mL, 80 mg/mL, 90 mg/mL, 100 mg/mL, 110 mg/mL, 120 mg/mL, 130 mg/mL, 140 mg/mL, 150 mg/mL, 160 mg/mL, 170 mg/mL, 180 mg/mL, 190 mg/mL, or 200 mg/mL. In some embodiments, the instructions for diluting or solubilizing the ASO as described herein in the diluent comprise instructions for diluting or solubilizing the ASO as described herein to a concentration of 11 mg/mL, 22 mg/mL, 33 mg/mL, 44 mg/mL, 55 mg/mL, 66 mg/mL, 77 mg/mL, 88 mg/mL, 99 mg/mL, or 100 mg/mL in the diluent.

[0631] In some embodiments, the instructions for diluting or solubilizing the ASO as described herein in the diluent comprise instructions for diluting or solubilizing the ASO as described herein to a concentration of from 0.1 mg/mL to 200 mg/mL, from 0.2 mg/mL to 200 mg/mL, from 0.3 mg/mL to 200 mg/mL, from 0.4 mg/mL to 200 mg/mL, from 0.5 mg/mL to 200 mg/mL, from 0.6 mg/mL to 200 mg/mL, from 0.7 mg/mL to 200 mg/mL, from 0.8 mg/mL to 200 mg/mL, from 0.9 mg/mL to 200 mg/mL, from 1.0 mg/mL to 200 mg/mL, from 1.1 mg/mL to 200 mg/mL, from 1.2 mg/mL to 200 mg/mL, from 1.3 mg/mL to 200 mg/mL, from 1.4 mg/mL to 200 mg/mL, from 1.5 mg/mL to 200 mg/mL, from 1.6 mg/mL to 200 mg/mL, from 1.7 mg/mL to 200 mg/mL, from 1.8 mg/mL to 200 mg/mL, from 1.9 mg/mL to 200 mg/mL, from 2.0 mg/mL to 200 mg/mL, from 2.1 mg/mL to 200 mg/mL, from 2.2 mg/mL to 200 mg/mL, from 2.3 mg/mL to 200 mg/mL, from 2.4 mg/mL to 200 mg/mL, from 2.5 mg/mL to 200 mg/mL, from 2.6 mg/mL to 200 mg/mL, from 2.7 mg/mL to 200 mg/mL, from 2.8 mg/mL to 200 mg/mL, from 2.9 mg/mL to 200 mg/mL, from 3.0 mg/mL to 200 mg/mL, from 3.1 mg/mL to 200 mg/mL, from 3.2 mg/mL to 200 mg/mL, from 3.3 mg/mL to 200 mg/mL, from 3.4 mg/mL to 200 mg/mL, from 3.5 mg/mL to 200 mg/mL, from 3.6 mg/mL to 200 mg/mL, from 3.7 mg/mL to 200 mg/mL, from 3.8 mg/mL to 200 mg/mL, from 3.9 mg/mL to 200 mg/mL, from 4.0 mg/mL to 200 mg/mL, from 5.0 mg/mL to 200 mg/mL, from 6.0 mg/mL to 200 mg/mL, from 7.0 mg/mL to 200 mg/mL, from 8.0 mg/mL to 200 mg/mL, from 9.0 mg/mL to 200 mg/mL, from 10 mg/mL to 200 mg/mL, from 15 mg/mL to 200 mg/mL, from 20 mg/mL to 200 mg/mL, from 25 mg/mL to 200 mg/mL, from 30 mg/mL to 200 mg/mL, from 35 mg/mL to 200 mg/mL, from 40 mg/mL to 200 mg/mL, from 45 mg/mL to 200 mg/mL, from 50 mg/mL to 200 mg/mL, from 55 mg/mL to 200 mg/mL, from 60 mg/mL to 200 mg/mL, from 65 mg/mL to 200 mg/mL, from 70 mg/mL to 200 mg/mL, from 75 mg/mL to 200 mg/mL, from 80 mg/mL to 200 mg/mL, from 85 mg/mL to 200 mg/mL, from 90 mg/mL to 200 mg/mL, from 95 mg/mL to 200 mg/mL, from 100 mg/mL to 200 mg/mL, from 105 mg/mL to 200 mg/mL, from 110 mg/mL to 200 mg/mL, from 115 mg/mL to 200 mg/mL, from 120 mg/mL to 200 mg/mL, from 125 mg/mL to 200 mg/mL, from 130 mg/mL to 200 mg/mL, from 135 mg/mL to 200 mg/mL, from 140 mg/mL to 200 mg/mL, from 145 mg/mL to 200 mg/mL, from 150 mg/mL to 200 mg/mL, from 155 mg/mL to 200 mg/mL, from 160 mg/mL to 200 mg/mL, from 165 mg/mL to 200 mg/mL, from 170 mg/mL to 200 mg/mL, from 175 mg/mL to 200 mg/mL, from 180 mg/mL to 200 mg/mL, from 185 mg/mL to 200 mg/mL, from 190 mg/mL to 200 mg/mL, or from 195 mg/mL to 200 mg/mL.

[0632] In some embodiments, the instructions for diluting or solubilizing the ASO as described herein in the diluent comprise instructions for diluting or solubilizing the ASO as described herein to a concentration of from 0.1 mg/mL to 200 mg/mL, from 0.1 mg/mL to 195 mg/mL, from 0.1 mg/mL to 190 mg/mL, from 0.1 mg/mL to 185 mg/mL, from 0.1 mg/mL to 180 mg/mL, from 0.1 mg/mL to 175 mg/mL, from 0.1 mg/mL to 170 mg/mL, from 0.1 mg/mL to 165 mg/mL, from 0.1 mg/mL to 160 mg/mL, from 0.1 mg/mL to 155 mg/mL, from 0.1 mg/mL to 150 mg/mL, from 0.1 mg/mL to 145 mg/mL, from 0.1 mg/mL to 140 mg/mL, from 0.1 mg/mL to 135 mg/mL, from 0.1 mg/mL to 130 mg/mL, from 0.1 mg/mL to 125 mg/mL, from 0.1 mg/mL to 120 mg/mL, from 0.1 mg/mL to 115 mg/mL, from 0.1 mg/mL to 110 mg/mL, from 0.1 mg/mL to 100 mg/mL, from 0.1 mg/mL to 95 mg/mL, from 0.1 mg/mL to 90 mg/mL, from 0.1 mg/mL to 85 mg/mL, from 0.1 mg/mL to 80 mg/mL, from 0.1 mg/mL to 75 mg/mL, from 0.1 mg/mL to 70 mg/mL, from 0.1 mg/mL to 65 mg/mL, from 0.1 mg/mL to 60 mg/mL, from 0.1 mg/mL to 55 mg/mL, from 0.1 mg/mL to 50 mg/mL, from 0.1 mg/mL to 45 mg/mL, from 0.1 mg/mL to 40 mg/mL, from 0.1 mg/mL to 35 mg/mL, from 0.1 mg/mL to 30 mg/mL, from 0.1 mg/mL to 25 mg/mL, from 0.1 mg/mL to 20 mg/mL, from 0.1 mg/mL to 15 mg/mL, from 0.1 mg/mL to 10 mg/mL, from 0.1 mg/mL to 9 mg/mL, from 0.1 mg/mL to 8 mg/mL, from 0.1 mg/mL to 7 mg/mL, from 0.1 mg/mL to 6 mg/mL, from 0.1 mg/mL to 5 mg/mL, from 0.1 mg/mL to 4 mg/mL, from 0.1 mg/mL to 3.9 mg/mL, from 0.1 mg/mL to 3.8 mg/mL, from 0.1 mg/mL to 3.7 mg/mL, from 0.1 mg/mL to 3.6 mg/mL, from 0.1 mg/mL to 3.5 mg/mL, from 0.1 mg/mL to 3.4 mg/mL, from 0.1 mg/mL to 3.3 mg/mL, from 0.1 mg/mL to 3.2 mg/mL, from 0.1 mg/mL to 3.1 mg/mL, from 0.1 mg/mL to 3.0 mg/mL, from 0.1 mg/mL to 2.9 mg/mL, from 0.1 mg/mL to 2.8 mg/mL, from 0.1 mg/mL to 2.7 mg/mL, from 0.1 mg/mL to 2.6 mg/mL, from 0.1 mg/mL to 2.5 mg/mL, from 0.1 mg/mL to 2.4 mg/mL, from 0.1 mg/mL to 2.3 mg/mL, from 0.1 mg/mL to 2.2 mg/mL, from 0.1 mg/mL to 2.1 mg/mL, from 0.1 mg/mL to 2.0 mg/mL, from 0.1 mg/mL to 1.9 mg/mL, from 0.1 mg/mL to 1.8 mg/mL, from 0.1 mg/mL to 1.7 mg/mL, from 0.1 mg/mL to 1.6 mg/mL, from 0.1 mg/mL to 1.5 mg/mL, from 0.1 mg/mL to 1.4 mg/mL, from 0.1 mg/mL to 1.3 mg/mL, from 0.1 mg/mL to 1.2 mg/mL, from 0.1 mg/mL to 1.1 mg/mL, from 0.1 mg/mL to 1.0 mg/mL, from 0.1 mg/mL to 0.9 mg/mL, from 0.1 mg/mL to 0.8 mg/mL, from 0.1 mg/mL to 0.7 mg/mL, from 0.1 mg/mL to 0.6 mg/mL, from 0.1 mg/mL to 0.5 mg/mL, from 0.1 mg/mL to 0.4 mg/mL, from 0.1 mg/mL to 0.3 mg/mL, or from 0.1 mg/mL to 0.2 mg/mL.

[0633] One aspect of the disclosure relates to kits including the ASO as described herein. The kits can further include one or more additional therapeutic regimens or agents.

[0634] Also disclosed herein, in some embodiments, are kits and articles of manufacture for use with one or more methods described herein. Such kits include a carrier, package, or container that is compartmentalized to receive one or more containers such as vials, tubes, and the like, each of the container(s) comprising one of the separate elements to be used in a method described herein. Suitable containers include, for example, bottles, vials, syringes, and test tubes. In one embodiment, the containers are formed from a variety of materials such as glass or plastic.

[0635] The articles of manufacture provided herein contain packaging materials. Examples of pharmaceutical packaging materials include, but are not limited to, blister packs, bottles, tubes, bags, containers, bottles, and any packaging material suitable for a selected formulation and intended mode of administration and treatment.

[0636] For example, the container(s) include the composition of the invention, and optionally in addition with therapeutic regimens or agents disclosed herein. Such kits optionally include an identifying description or label or instructions relating to its use in the methods described herein.

[0637] A kit typically includes labels listing contents and/or instructions for use, and package inserts with instructions for use. A set of instructions will also typically be included.

[0638] In some embodiments, a label is on or associated with the container. In one embodiment, a label is on a container when letters, numbers or other characters forming the label are attached, molded or etched into the container itself, a label is associated with a container when it is present within a receptacle or carrier that also holds the container, e.g., as a package insert. In one embodiment, a label is used to indicate that the contents are to be used for a specific therapeutic application. The label also indicates directions for use of the contents, such as in the methods described herein.

### EXAMPLES

[0639] The present disclosure will be more specifically illustrated by the following Examples. However, it should be understood that the present disclosure is not limited by these examples in any manner.

### Example 1: Mechanism of TANGO (Targeted Augmentation of Nuclear Gene Output)

[0640] TANGO uses ASOs to specifically increase protein expression by targeting naturally-occurring non-productive alternative splicing events. TANGO can reduce non-productive messenger RNAs (mRNA), which are normally targeted for degradation by nonsense-mediated mRNA decay (NMD) as shown in FIGS. 1A and 1B. In turn, TANGO can increase productive mRNA and protein. TANGO can specifically increase expression of canonical target mRNA and full-length protein in tissues with endogenous gene expression. As these events are naturally-occurring, TANGO can upregulate the wild-type alleles in the context of autosomal dominant haploinsufficiency, thus providing a potentially unique opportunity to treat diseases.

### Example 2: Experimental Administration of Antisense Oligomer ASO-22 to Mice

[0641] Mice were administered a single intracerebroventricular (ICV) injection of ASO-22 or vehicle (PBS) at postnatal day P2 or P14. Mice were monitored for survival out to 14 weeks. To monitor for seizures, mice are implanted with an 8201-EEG Headmount (Pinnacle Technology, Inc., Lawrence, Kans.) and seizure activity was continuously monitored from P22-P46. ASO-22 Measurement: ASO-22 levels were measured by Liquid Chromatography Mass Spectrometry (LCMS) SCN1A gene expression measurement Productive Scn1a mRNA transcripts were measured using Tagman qPCR assays. Na_{V}1.1 Protein measurement: Na_{V}1.1 protein was measured using a Mesoscale Discovery electrochemiluminescence (MSD-ECL) assay which utilizes Na_{V}1.1 expression in wild-type mouse brain tissue lysates as a standard.

### Example 3: Monitoring Survival of Mice after ASO-22 Administration at Post-Natal Day 2

[0642] Mice groups were monitored for survival after ASO-22 was administered. FIG. 2 shows an exemplary survival curve demonstrating 100% long term survival benefit provided by a SCN1A targeting ASO (termed as “ASO-22”) in Dravet mouse model. WT and heterozygous Dravet mice (+/−), F1 offspring from 129S-scn1a^{tm1Kea}×C57BL/6J crosses, received a single dose ICV injection of 20 μg PBS or ASO-22 blindly on postnatal day 2, and their survival was monitored until 14 weeks. As depicted, Dravet mice receiving PBS treatment started to die from about postnatal day 20, whereas all mice of other three groups, including Dravet mice receiving ASO-22 treatment group, survived at least 70 days. Kaplan-Meier curve showing DS and WT littermate mice monitored to 14 weeks for survival. Administration of ASO-22 significantly (p<0.0001; ****=p<0.0001 on FIG. 2) improved survival in the Dravet mouse model. 33/34 survived up to 14 weeks, compared with 14/62 animals in PBS-treated group. ASO-22 administration at P2 was able to prevent SUDEP (Sudden Unexpected Death in Epilepsy) in the DS mouse model.

### Example 4: Monitoring of Seizures in Mice

[0643] EEG recording was performed on the mice to monitor seizures. FIG. 3 shows experimental design for the EEG seizure monitoring study in DS mice (n=21/group) and their WT littermates (n=11-12/group). Mice received a 20 μg ICV injection of ASO-22 or PBS vehicle at P2, underwent surgery for EEG head mounts at P20, and were continuously monitored by EEG from P22 to P46. WT mice injected with ASO-22 had normal EEGs throughout the monitoring period (data not shown). FIG. 4A shows representative traces from three channels during a seizure event recorded in different parts of the brain of a PBS-injected DS mouse, including the frontal cortex, the hippocampus, and the Parietal cortex. As shown in FIG. 4B, the number of recorded spontaneous seizures in the mice were shown to be reduced significantly in DS mice demonstrating a robust seizure freedom. In all mice, seizures were predominantly generalized as observed by the similar data obtained in the different areas of the brain. FIG. 4C is a summary of effect of ASO-22 on total number of spontaneous seizures (generalized and focal) recorded between P22 and P46 in DS mice dosed with PBS (n=21) or ASO-22 (n=21). *Indicates p<0.05. Additionally, as shown in FIG. 4D, the number of seizure-free mice increased after ASO-22 administration at P2, while the number of mice having 2 or more seizures decreased compared to control. Wild type mice did not have any seizure regardless of treatment. A 50% increase (76% vs 48%) in the number of mice that experienced no seizures following administration of ASO-22 at postnatal day 2 and monitored by EEG between postnatal day 22 and day 46. Reductions in the number of mice that experienced two or more seizures following administration of ASO-22 at postnatal day 2 compared to placebo (14% vs 38%). An 80% reduction (3 vs 15) in the average number of spontaneous seizures detected between postnatal day 22 and day 46 after treatment with ASO-22 compared to placebo (p<0.05). ASO-22 administration at P14 was able to significantly reduces SUDEP in the DS mouse model. Furthermore, administration of ASO-22 significantly prolonged latency to first seizure in DS mice during the recording period (p<0.05, FIG. 4E). There was non-statistically significant trends suggesting increased numbers of seizure-free DS mice (48% PBS vs 76% ASO-22) and decreased numbers of DS mice having 2 or more seizures (38% PBS vs 14% ASO-22) over the assessment period following ASO-22 administration.

### Example 5: Detection of ASO-22 Exposure and Protein Expression Levels in Mice Brains

[0644] Mice brains were collected in order to detect exposure of the ASO to the brain tissue as well as detect the protein expression levels in the brain tissue. FIG. 5A shows the experiment timeline. Wild type (WT) or heterozygous Dravet mice (HET) F1 mice from 129S-scn1a^{tm1Kea}×C57BL/6J crosses were subjected to an intracerebroventricular (ICV) injection at postnatal day 2 of 20 μg of ASO-22 or PBS. The brains of the mice were collected at 7 weeks from a subset of mice in all mice groups. A second collection of brains was performed at 14 weeks from another subset of mice in all mice groups. The brain tissues were shown to have a robust and long-lasting exposure to ASO-22 (˜13 μg/g at 7 weeks; FIG. 5B and ˜8 μg/g at 14 weeks; FIG. 5E) as measured using Liquid Chromatography-Mass Spectrometry (LC-MS). The expression levels of Scn1a productive transcript were increased after ASO-22 administration by ˜1.5-2 fold in both WT and DS mice at 7 weeks (FIG. 5C) and 14 weeks (FIG. 5F). FIG. 5D (7 weeks) and FIG. 5G (14 weeks) shows an increase in Na_{V}1.1 protein in ASO-22 treated DS mice. Na_{V}1.1 protein increased in ASO-22 treated DS mouse brains to levels indistinguishable from PBS-treated WT brains at 7 weeks and 14 weeks. Na_{V}1.1 protein in the brains of ASO-22 injected WT animals also increased over PBS treated WT mice with no obvious adverse effects.

### Example 6: Monitoring Survival of Mice after ASO-22 Administration at Postnatal Day 2

[0645] Mice groups were monitored for survival after ASO-22 was administered on P14. FIG. 6A shows a study design timeline with the mice injected on P14 and monitored until P90. FIG. 6B shows an exemplary survival curve demonstrating long term survival benefit provided by a SCN1A targeting ASO in Dravet mouse model. WT and heterozygous Dravet mice (+/−), F1 offspring from 129S-scn1a^{tm1Kea}×C57BL/6J crosses, received a single dose ICV injection of 60 μg PBS or ASO blindly on postnatal day 14 (which was around the time of disease onset), and their survival was monitored until P90. As depicted, Dravet mice receiving PBS treatment started to die from about postnatal day 20 resulting in an lower survival rate at P90 than the DS mouse treated with ASO-22. 47/74 of the PBS treated DS mice survived up to P90 whereas 45/53 (p<0.005) of the DS mice treated with ASO-22 survived up to P90.

### Example 7: Detection of ASO-22 Exposure and Protein Expression Levels in Mice Brains

[0646] Mice brains were collected in order to detect exposure of the ASO to the brain tissue as well as detect the protein expression levels in the brain tissue. FIG. 7A shows the experiment timeline. Wild type (WT) or heterozygous Dravet mice (HET) F1 mice from 129S-scn1a^{tm1Kea}×C57BL/6J crosses were subjected to an intracerebroventricular (ICV) injection at postnatal day 14 of 60 μg of ASO-22 or PBS. The brains of the mice were collected at P35 from a subset of mice in all mice groups. A second collection of brains was performed at P90 from another subset of mice in all mice groups. The brain tissues were shown to have a robust and long lasting exposure to ASO-22 (˜36 μg/g at P35; FIG. 7A and ˜10 μg/g at P90; FIG. 7D) as measured using LCMS. The expression levels of Scn1a productive transcript were increased after ASO-22 administration by ˜1.5-fold in both WT and DS mice at P90 (FIG. 7E) with no significant change at P35 (FIG. 7B). FIG. 7F shows an increase in Na_{V}1.1 proteins in ASO-22 treated DS mice at P90 with no significant change at P35 (FIG. 7C). Na_{V}1.1 protein increased in ASO-22 treated DS mouse brains to levels indistinguishable from PBS-treated WT brains at P90. Na_{V}1.1 protein in the brains of ASO-22 injected WT animals also increased over PBS treated WT mice with no obvious adverse effects.

### Example 8: Administration of ASOs to Cynomolgus Monkey

[0647] 2-3 year old naïve cynomolgus monkey were administered a single bolus intrathecal lumbar (IT-L) injection of artificial cerebrospinal fluid (aCSF) or one or two dose levels of ASO-22 antisense oligomer (ASO) on the first study day. Two dose levels of an optimized ASO that was active in targeting a nonproductive alternatively splicing event in Scn1a in rodent was evaluated in cynomolgus monkeys for safety, brain biodistribution, target engagement and pharmacodynamics. After a single intrathecal lumbar bolus injection (IT-L) of the ASO, animals were sacrificed and ASO, Scn1a mRNA and Na_{V}1.1 protein levels were measured on Day 3 (48 hours post dose) and on Day 29 (28 days post dose). FIG. 8 shows the treatment, dosing and amount of animals used for an exemplary study.

[0648] After dosing, the animals underwent a standard clinical and neurological observation and blood samples were collected. CSF and brains were collected at necropsy. Separate punches of various regions were collected for ASO-22 concentration levels, gene expression and protein expression measurements. ASO-22 levels were measured by liquid chromatography mass spectrometry (LCMS) in tissues and by hybridization enzyme-linked immunosorbent assay (HELISA) in plasma and CSF. Productive and non-productive (NMD-inducing) Scn1a mRNA transcripts were measured using Taqman qPCR in order perform SCN1A gene expression measurements. Na_{V}1.1 protein was measured using a Mesoscale Discovery Electrochemiluminescence (MSD-ECL) assay which utilizes a recombinant fragment of Na_{V}1.1 as a standard. The ASO was well tolerated at both dose levels with no changes on physical and neurological exams, no changes in food intake, body weight, hepatic function or platelet counts, no complement system activation, and no abnormal histopathology was observed in all tissues examined.

### Example 9: Detection of ASO-22 ASO in the Brain Tissues of Cynomolgus Monkeys

[0649] The brains of 2-3-year-old naïve cynomolgus monkeys were analyzed for levels of the ASO-22 ASO using LCMS. Cynomolgus monkeys were sacrificed at Study Day 3 and Study Day 29 to observe the levels of ASO-22 in various brain tissues for the various doses. FIG. 9A shows the levels of ASO-22 in various area of the brains of the monkeys on Study Day 3. At the low dose, ASO-22 exposure was below the limit of quantitation (BLQ) in most of the brain regions. At the high dose, the ASO-22 was detectable, primarily detected in the cortex and the cerebellum. FIG. 9B shows the levels of the ASO-22 at Study Day 29. At the low dose, the brain tissue exposure was BLQ in most regions of the brain. For the high dose level, exposure in the cortical brain regions was generally higher than in the deeper structures and the level of exposure was generally increased from Day 3. ASO-22 is observed to distribute broadly in the non-human primate brain at the higher dose level.

### Example 10: Detection of Na_{V}1.1 Expression in the Brain Tissues of Cynomolgus Monkeys

[0650] The brains of 2-3-year-old naïve cynomolgus monkeys were analyzed for levels of the Na_{V}1.1 expression. Cynomolgus monkeys were sacrificed at Study Day 3 and Study Day 29 to observe the expression levels of Na_{V}1.1 in various brain tissues for the various doses. FIG. 10A shows the levels of ASO-22 in various area of the brains of the monkeys on Study Day 3. All brain regions assessed had measurable levels of Na_{V}1.1, with midbrain, motor cortex, occipital cortex and motor cortex being the highest. No or marginal change in Na_{V}1.1 levels in brain tissues were observed at the low or high dose levels of ASO-22. FIG. 10B shows the levels of the ASO-22 at Study Day 29. No or marginal change in Na_{V}1.1 level in brain tissues were observed at the low dose of ASO-22. At the high dose of ASO-22, Na_{V}1.1 protein level increased by 1.2- to 3-fold in motor cortex, occipital cortex, parietal cortex, and prefrontal cortex compared to aCSF treated animals.

### Example 11: Detection of SCN1A Expression in the Brain Tissues of Cynomolgus Monkeys

[0651] The brains of 2-3-year-old naïve cynomolgus monkeys were analyzed for levels of the SCN1A expression. Levels of productive SCN1A gene and levels of total SCN1A gene expression were determined in order to evaluate the target engagement of the ASO-22 ASO. Cynomolgus monkeys were sacrificed at Study Day 3 and Study Day 29 to observe the expression levels of SCN1A in various brain tissues for the various doses. FIG. 11A shows the percentage of productive SCN1A gene expression/total SCN1A gene expression in various area of the brains of the monkeys on Study Day 3. No significant changes in percentage of productive gene expression were observed for either dosage compared to the control aCSF expression at Day 3 for any of the brain regions, indicating that limited target engagement had occurred. FIG. 11B shows the percentage of productive SCN1A gene expression/total SCN1A gene expression in various area of the brains of the monkeys on Study Day 29. Significant target engagement as determined by measurement of productive SCN1A gene expression/total SCN1A gene expression was observed in prefrontal cortex, parietal cortex, occipital cortex and limbic lobe on Day 29 at the high dose of ASO-22.

### Example 12: Detection of ASO-22 ASO in the Plasma and CSF of Cynomolgus Monkeys

[0652] The plasma and CSF of 2-3 year old naïve cynomolgus monkeys was analyzed for levels of ASO-22 after the intrathecal administration of ASO-22. FIG. 12A shows the plasma pharmacokinetics of the ASO-22 in the monkeys for the low and high dose. Plasma levels were observed at timepoint from 1 hour from the administration up until 29 days from administration. ASO-22 reached mean peak plasma levels approximately 1 hr (first time of collection) for the low dose and 2 hr for the high dose. The concentrations declined in a biphasic manner. Peak and total exposures of each compound increased with increasing dose. Measured levels of ASO-22 in predose and aCSF-dosed samples were below the limit of quantification of each assay.

[0653] FIG. 12B shows the levels of ASO-22 in the cynomolgus monkey CSF on day 3 and day 29. At Day 3, the observed CSF exposure in the low and high dose groups were similar. CSF ASO-22 levels decreased markedly from Day 3 to Day 29 for both doses suggesting a transition from distribution to clearance phase during this period. Mean exposure levels were variable, but slightly higher in the high compared to the low dose group at Day 29.

### Example 13: Identification of NMD-Inducing Exon Inclusion Events in SCN1A Transcripts by RNAseq Using Next Generation Sequencing

[0654] Whole transcriptome shotgun sequencing was carried out using next generation sequencing to reveal a snapshot of transcripts produced by the SCN1A gene to identify NIE inclusion events. For this purpose, polyA+RNA from nuclear and cytoplasmic fractions of HCN (human cortical neurons) was isolated and cDNA libraries constructed using Illumina's TruSeq Stranded mRNA library Prep Kit. The libraries were pair-end sequenced resulting in 100-nucleotide reads that were mapped to the human genome (February 2009, GRCh37/hg19 assembly). Briefly, mapped reads visualized using the UCSC genome browser (operated by the UCSC Genome Informatics Group (Center for Biomolecular Science & Engineering, University of California, Santa Cruz, 1156 High Street, Santa Cruz, Calif. 95064) and described by, e.g., Rosenbloom, et al., 2015, “The UCSC Genome Browser database: 2015 update,” Nucleic Acids Research 43, Database Issue, doi: 10.1093/nar/gku1177) and the coverage and number of reads can be inferred by the peak signals. The height of the peaks indicates the level of expression given by the density of the reads in a particular region. The upper panel shows a graphic representation of the SCN1A gene to scale. The conservation level across 100 vertebrate species is shown as peaks. The highest peaks correspond to exons (black boxes), while no peaks are observed for the majority of the introns (lines with arrow heads). Peaks of conservation were identified in intron 20 (NM_006920), shown in the middle panel. Inspection of the conserved sequences identified an exon-like sequence of 64 bp (bottom panel, sequence highlighted in grey) flanked by 3′ and 5′ splice sites (underlined sequence). Inclusion of this exon leads to a frameshift and the introduction of a premature termination codon in exon 21 rendering the transcript a target of NMD.

[0655] Exemplary SCN1A gene, pre-mRNA, exon, and intron sequences are summarized in Table 1. The sequence for each exon or intron is summarized in Table 2.

TABLE 1
List of target SCN1A gene and pre-mRNA sequences.

| Species | SEQ ID NO. | Sequence Type |
|---|---|---|
| Human | SEQ ID NO. 1 | SCN1A gene (NC_000002.12) |
| | SEQ ID NO. 2 | SCN1A pre-mRNA (encoding e.g., Scn1a |
| | | mRNA NM_006920.5) |
| | SEQ ID NO. 3 | Exon 20 gene |
| | SEQ ID NO. 4 | Intron 20 gene |
| | SEQ ID NO. 5 | Exon 21 gene |
| | SEQ ID NO. 6 | Exon 20x gene |
| | SEQ ID NO. 7 | Exon 20 pre-mRNA |
| | SEQ ID NO. 8 | Intron 20 pre-mRNA |
| | SEQ ID NO. 9 | Exon 21 pre-mRNA |
| | SEQ ID NO. 10 | Exon 20x pre-mRNA |
| Mouse | SEQ ID NO. 11 | SCN1A gene (NC_000068.7) |
| | SEQ ID NO. 12 | SCN1A pre-mRNA (encoding e.g., Scn1a |
| | | mRNA NM_001313997.1) |
| | SEQ ID NO. 13 | Exon 21 gene |
| | SEQ ID NO. 14 | Intron 21 gene |
| | SEQ ID NO. 15 | Exon 22 gene |
| | SEQ ID NO. 16 | Exon 21x gene |
| | SEQ ID NO. 17 | Exon 21 pre-mRNA |
| | SEQ ID NO. 18 | Intron 21 pre-mRNA |
| | SEQ ID NO. 19 | Exon 22 pre-mRNA |
| | SEQ ID NO. 20 | Exon 21x pre-mRNA |

TABLE 2
Sequences of target exon or intron in SCN1A pre-mRNA transcripts.

| SEQ ID | | |
|---|---|---|
| NO. | Sequence Type | Sequence |
| SEQ ID | Exon 20 pre- | GUUUCAUUGGUCAGUUUAACAGCAAAUGCCUUGGGUUACUC |
| NO. 7 | mRNA | AGAACUUGGAGCCAUCAAAUCUCUCAGGACACUAAGAGCUC |
| | | UGAGACCUCUAAGAGCCUUAUCUCGAUUUGAAGGGAUGAGG |
| SEQ ID | Intron 20 pre- | guaagaaaaaugaaagaaccugaaguauuguauauagccaaaauuaaacuaaauuaaauuuag |
| NO. 8 | mRNA | aaaaaggaaaaucuaugcaugcaaaaggaauggcaaauucuugcaaaauugcuacuuuauugu |
| | | uuuaucuguugcauauuuacuucuaggugauaugcaagagaaauaggccucucuugaaauga |
| | | uauaauaucauuuaucugcugugcuuauuuaaaugacuuuauuuccuaauccaucuugggag |
| | | uuuccuuacaaaucuauauacaaaaaaaagcugaugcauuauuaaaguacuauguguaaugau |
| | | auaaugguaaucuaaaguaaauucuauaucagguacuuauucuuugugaugauauacuguac |
| | | uuaacgaguuuuccugaaaauaaugugaaucacacaugugccuaaguaugaguguuaagaaa |
| | | aaaaugaaaggaguuguuaaaacuuuugucuguauaaugccaaaguuugcauuauuugaaua |
| | | uauucaagauuagaugguuagauauuaaguguugacugaauuuauaaaacuaguaauacuaa |
| | | cuuaaagauuacauacaaauccacaucauuuuuauaacaauaaaguaaaacacuuauaaugaac |
| | | agaaaauauaauuuugacucauuacuauagguaauuuauacauuaaccuuaacuugcaucuua |
| | | uuggucagagucacacaaaauguuauuuuauccuuuucaaagaugcaauaaucauuuuccau |
| | | caugcauaacagauuagaaauuuugccauuauugacuuauuuuccaugccuuuuuuuacggc |
| | | augaagcauuaguuuauagauauauaauauaaaaaauuaguucugcuuuuuuuuaaaaaaaa |
| | | auauuaucaaaacaaaacacugaauugugugauuccaauagaaaaacacugcucuuucaccuc |
| | | cuaagguguaguuacuuuuauggaaacuaagcuguauuguagacuuccauuugcacuuugua |
| | | gauuguuuauagccuuauguucucuucucaagucuuauuauaaaugucacuuuguaagaacg |
| | | uaggacuugucuucgauuucccuaacauauaugaaaacuuuguccucauuaucgacaacucag |
| | | aacaauauaauacaaguaguccucuuuuauuucucacagagagccucaaauuuucaccaaaau |
| | | guuaacagaaauuaucucugggguguauaagaauuaagucuguuuuccaauuaaaugucacu |
| | | uuguuuuguuucagacuggcaguuucaguucuggagaaaaaaaaugucauuuguguacauuc |
| | | uacuugaaaacauguugccugaaucaaaauaauauauuuuauauggcuugugaaaucugaac |
| | | aaugcuaaacauuugaaaauauuauaaaccuuuuacauuugaccauuugaaaguuuauuaaau |
| | | ucauuggucaagugcucagauauuuccauacauuacacuucauuucuauaaaaaagcugaucu |
| | | uaucgguauacuuuuaauuuucucagaaauaaccauaucuauaauuauuaaucaauaaugccu |
| | | uuuauauuaaaagagguuaguuuuugaaacuuggaguuuuagacauaaaauccuuauaaaug |
| | | cugauagugauauaacuaauaguuuaaauggucagauuuaugaauauggcucuauuccucau |
| | | aaugacaacauacacacagcacuaaaaugacuaaucucuucaauacguguuuggcauuguaga |
| | | gucaaaauaacguuauaauugauucuauuuuuuauacuucuaguguuuggauauuuuauuu |
| | | uguaaaaauauaaucaugaaugauggugagguuggauauaagaaugaugauuaugauuggga |
| | | agugagauuugaacaugcucagaaacucucauuuaauucuuugcccuagcagcauaaaaucac |
| | | aauagcugcgucaaagcguaacucaggcacucauuuuauuuuuguuguucuguuauuuuuuc |
| | | aaagcaugugcuuuuaugcaacauuacugaauaaagcauguuguacagugcuugauaagaag |
| | | uuagaaaguaacaaauaaauuaucaucacguugcacuuuguguuuugcauguuuuaugcaca |
| | | uuucuggcugacagcuuuuaaacauuuauuguauuucaaauuuccaguccaaauuuuucaac |
| | | uuguaaaauuaaacugagugaauugaugucgugaauaucuaggguaaaauaaaauuuguguu |
| | | uaaauuuguauuuuuaauuuccuaaccuaggaaaucuuaaauaccuucuuuuucaaaagaac |
| | | ucaagucuuaauggauagggaaacagacggagagcaucaugaacaaaaaguaacaccaaaugu |
| | | ucugucauaucagauuucuaacuaauaacaaacuauauauuucuauuuuguauaggauaauc |
| | | uugcuccaacuuggaugggguggagcgcugguuccuccccugagcccuuuauuauggguacu |
| | | guauuaccccuuuugcuaccuuuaauccuugcacugugacuuauguguaguggggugaggg |
| | | agggauugggaaggguacuauuauugcaccacaguagggaaaauacauuauuuacauccuaa |
| | | uccccucuuuucaauugucuuaaauuucauuugaaaaaaaaaaaaaccuuuaugaauuuaccc |
| | | ucuguggauuuuaaccccaaugguugauaucuuuauuaaguuucauugaauaugauuuagu |
| | | uauguguauauggaguuauccaucuuuggggagauuacuggauuggugagggcgggggacc |
| | | cugguguagaaugauuaugugaaaaaacaauuuaacuuguuaagcucaugauacuguuugag |
| | | gcauacagccccugcuguuuaguacauuggucuggguccugaaaauuaccaguuagauacca |
| | | ucaguugauuauugauauguaugagcagauacuagggugcaauauuucagguuucauaagac |
| | | ugguauugauugugaccacucucauuuuuuauuguguaaguucauaugggguuauuuucaa |
| | | aauguuaacaaggcaaaaauauauuaagaaauaguugaauaagcacaugugaauuguguugu |
| | | aaacaaaaaguuagaauaaaaaaauccacuuauuugaauuaugcagaauagaauacauaccuag |
| | | aaauaaaacaaaaacgucuuaucaugaguauuaagauaaaauuuaaggcauaaacucacuucu |
| | | uagaauaaguaacucccaacuaacuuucuaggauuuuaaaacauaacacagugaaaacauacau |
| | | aaacauaacucuacauuuuauuuauucuuaaaguuuaaguguauuauacaagaagaagaguu |
| | | uauauucgagagacagaaaaagucagaauuuuuguuuggaucaccaauauaucauagcuuaca |
| | | aaaaaacugucuuaauuaaaacccacaacauaauuuuuuuagauuuuuaagaaagauucuauu |
| | | auucuucuuuauacuuaaaaauggaugauuccuacuuugcccacuuuuauuuuuauucacau |
| | | agauuuucuuuauuucuauuagagaagcacuagaauucaugaauaguguugauuugaaguuc |
| | | aaaguaauuaauucagauaaaaagacauuucugcauguaugaaaauuucuaaugugaauuug |
| | | cauauuuaauuaucaauccuucauuuaguguagacuuauuuuuaaaaaugcagguaaugaac |
| | | cagaaauagaauugguugugcuagaguagagaaacuuuauuugaugauuguuuugaaaaaaa |
| | | agcuucugagaagaaacaaccucuaguacaguauuaauucauuaagauagcuccuuucucaga |
| | | cauuuccuuucauguagccugaaaguucaauuugaaauuuguucuuuccaauuuauucagac |
| | | uaauucugccuacuuucuuccccccauaagaaccaauuacugcagcuuuauugagacugaaaa |
| | | aaguuaauacaccuccuucuuugcugaaccaaggaauggcuuggaacucuugggaaaagacaa |
| | | ucuuuucuaugaucuuucauugucuaauuuaauacaucauaaauaugacuauagcuuuguau |
| | | aauaaacuccccaauacugugccagauguuuucuaagauaaaguuauuuuauguucacaaaaa |
| | | aaauaaaacuuuucucugggccaaauguaugccaacuuugcaaaucauauccugaagugcacu |
| | | gcugcagaguacaugcuugcgucauaaauuccauagaguucgcuuuaacucuaaaucaauccc |
| | | caguuucaaaguaaaccucucaaacauauuaccuaagcacaaacuucucccugugcucaguuc |
| | | cuuaauuauucucaucccauauucagaaauaacauuuaaaaauuaugcuuugaucaauaaaua |
| | | cuaaucuaaacuuugcuucauuaacccauucauuuuugucaaccauuauuuuauuccuauau |
| | | ucaaagcucucugguauguucuuauauucaagacacucaaggcccuggaagauucacgaacau |
| | | auguuugcaucuuaaauuuuuagaaaaucuuacaaucugucaggauuacacugaacucuagu |
| | | acagaguaauauggguaccagauaagugggagcaacucuuccacguagacuggaaacagcacu |
| | | aaaugcuauuuauaggcuacuuucugaacuuaacuuguuuuaaccucauuuuucucauaugc |
| | | caaaugagaacgcaauacugaauuaucuguacaguucuguucaguacuagaauucugauucu |
| | | ugaauucaaaggggaaaacauuccucuuuauuuuggaggcuaaacugggggacaaaguuagg |
| | | cuccaugaaagaagugcuauuugaacuaaagccuuuaagaggggagaguauuucagaagagg |
| | | agcuauuagacaaggaauuucaauguaaauggcaucucaaucaccuggcaauuauauuagcac |
| | | acgguuauuauauuaauugaaguggcaugaaguauagaugaccagggaaguuaaaacuggaa |
| | | auauagauuguggagugaugugaauaccaagguaagaaaaauauuuguuaguuaccagagag |
| | | ccaauaaauaacuuucaagugggacuuggggaagauuaauucaucuuacauagauuaaaugaa |
| | | ggagaagguuaggagacagaugacagugcaaguaugaaauaacagagggcaguucuaggugg |
| | | ugacugugagaauggaaaagagguggcaaagcugagaaacguuucaaagaaaaaaugugagac |
| | | agguaaugugaaaagaaaaucgagaaauagguauagauaaucaguguucugcucauacucuaa |
| | | auuggguguugaaggcaaaauacguauuuuaauuaguacucuguguauacacacuagaaaca |
| | | gcauuguaaucuggauaguggacaaaauauucagaaaagaagggaaauaguaacuugauuuc |
| | | aauuuccaaaucucuaaucugaaagaaaucuaauucuauucauccauuuaaaauaaauuauau |
| | | aacgagaauuuaugaaguccauuguauuaaugcagacagucagaugagauaaggcaaagugu |
| | | cacgugucagcuugguaguugcaucggccacaucauuugguucugccuggauaacucaacca |
| | | aauuaauuuuucauacucauccccuccaccuuugucauuacugguauucuuauuuucuuugg |
| | | cccacuuaucacacuguuuuauguuccccagaaggccuagaguucuuuacaggcuuuaaacag |
| | | ggaucagaaguauaagaaauuggcucauguauuuuuuuuucagacaggcaguuaaaaaaaau |
| | | uguucuaaaaauacacuggcaucaaauggcaaauagaagauguuuugacgacuacuuccauug |
| | | gaucagacugacaagaauaauacaagcacauagguggaauuaaacuuagcuauuaauguccaa |
| | | guuugaggcagcugccccuuauaagcauuuuagggucuguuuuuagcuucccucuuagccac |
| | | uccugugcagcuccagugggagguauggaggaaaaagcaaggaagccaucccuauguuguuu |
| | | ccaaacaugaacacucaagauuuuuaacuagugguccagaaguaaagagggggaaaacauccu |
| | | ucuauagaaaaaaaaaaaaguagauaauaauugaacacagaacuucaugugaucacaucagau |
| | | uugagaacuauguauggcaucccucuuuuucuuauuuuccuaagaaaugauuucuauuaugu |
| | | uucauuugaaauaaguuuuuugaauuaaacucaguaaaugaaacaacugacaugacuggagc |
| | | uugaaauaaacgaugugaugaucuaaugaaauacauaaugcaaauugucuugcuucuuaugc |
| | | aaaaauuauuagucauagcaaugcaugaauaauuaaagacaauuauauuagguauuuaauaau |
| | | auuuuuuauauuuaucaucugaauuuuuaaguuauuuuaaaaauauauuggucaaaucaacu |
| | | cagguccaaauguuuuaguuuuguucuuuaauauauugccuuuuuaaaaugaguuaaacuuc |
| | | uguauaggcuuuuuaacuuuucuuuauucugauaacacaauucugacuucaucuggcagcaa |
| | | guuccucugauuuuccuuuuccuuuaaccuuuuaaugcuucucccucccuuuuuuuuaaaaa |
| | | cauuuuuguuucauuucuugguuauauugccuauaguuguuuuccuaaguguauugcuuaa |
| | | gaaaaaaaaaugaauuuuaagauuuuuuugaaccuugcuuuuacauauccuagaauaaauagc |
| | | auugauagaaaaaaagaauggaaagaccagagauuacuaggggaauuuuuuuucuuuauuaa |
| | | cagauaagaauucugacuuuucuuuuuuuccauuuguguauuag |
| SEQ ID | Exon 21 pre- | GUGGUUGUGAAUGCCCUUUUAGGAGCAAUUCCAUCCAUCAU |
| NO. 9 | mRNA | GAAUGUGCUUCUGGUUUGUCUUAUAUUCUGGCUAAUUUUCA |
| | | GCAUCAUGGGCGUAAAUUUGUUUGCUGGCAAAUUCUACCAC |
| | | UGUAUUAACACCACAACUGGUGACAGGUUUGACAUCGAAGA |
| | | CGUGAAUAAUCAUACUGAUUGCCUAAAACUAAUAGAAAGAA |
| | | AUGAGACUGCUCGAUGGAAAAAUGUGAAAGUAAACUUUGAU |
| | | AAUGUAGGAUUUGGGUAUCUCUCUUUGCUUCAAGUU |
| SEQ ID | Exon 20x pre- | gauaaucuugcuccaacuuggaugggguggagcgcugguuccuccccugagcccuuuauuau |
| NO. 10 | mRNA | gg |
| SEQ ID | Exon 21 pre- | GUUUCAUUGGUCAGUUUAACAGCAAAUGCCUUGGGUUACUC |
| NO. 17 | mRNA | UGAACUCGGGGCCAUCAAAUCCCUAAGGACACUAAGAGCUCU |
| | | GAGACCCCUAAGAGCCUUAUCACGAUUUGAAGGGAUGAGG |
| SEQ ID | Intron 21 pre- | guaagaaaaaggaaaacucugcagcguuguauauugucaaagcuaggcugaguucaacuuaac |
| NO. 18 | mRNA | uaacgaaaaacacgugcaugcaaaaggaauggcaacccuuugcaaacuugcuacuuuacccuu |
| | | uucucuguugcauauuuacuucuuggugauaugcaagagaaaaucggccucuuugaaaauga |
| | | uuuaauaucauuuaucugcuuugcuaauuaaaaugaccuuaguucauaaucgaucuugggag |
| | | uuuccuuauaauuccuaauacaaagggggaggggcagauacucucuuaaagaacuaaguuga |
| | | gucauguaauaauuaccuagagauaauuuuguuucauaucguucuccucuaugacagcccau |
| | | caguacuuaagggauccuauggaaaguaaugugaaucacaaauguguaugaauacaaaggaaa |
| | | aaaugaagaauuguuaaauguuuugucuuuacaaugccaaaauucucauuauuugaauauau |
| | | ccaagggcagauauuaaccauugacuggaguauaauaauacugccucaacuguaacuaaauua |
| | | augacauugaauaaguaagacacuaauuuaauuacuauaaauacauacacaucuuaugacaau |
| | | acagcugauaaggaaaaagaacauguauuuuuauucauugccauacauggcucgucaaccuua |
| | | acuuaaaccucgguucucaguuacacagaguuuuauguugcucuuuugagcaaagcauuauu |
| | | ccccucuccauaauucaacacguaucagauuuuugcauuuauuggcucauuguuaugaugau |
| | | uauuucaaagcauuauacaaucauuuauagaagaugugccgugugaaaauuauuuuuuuauu |
| | | aagauccaaaauuuacgcucuuuaaaccaaucagaugaaauguauaaggcaaagagugcucau |
| | | uguccugacacuuacaaaccaaggcuccaacaaacaggcuccucucugcaccacauagagggcu |
| | | uucagccuguguccccccauaaaaaccuauuauaaauuuuauuauacuauacuguaagaaacc |
| | | uguccaauuuuuaauuucucuagcacauaugaaaacuucucuucaguagauccaaguaagcac |
| | | aaaggagcuuugauucucacacaagaaaucacauuuguauuaaaaauguaucauaaauuuucu |
| | | cccaauuaugcaaaacuuaaaugcuuuuccaauuaaaagagcacuuucguuucagaauagcaa |
| | | uuucaguugucaaggaaaacauuguuuuuauacauuuuauauaaaaauacaugagcuaaauu |
| | | uaaauucacauuuuucaacuuuuuaugguuuuuuuauguuucuuuuucuuucgcauuuuuu |
| | | aacaauccagccauuaccucuccucccugucccccuccuauaguuucucaucucauuccuccu |
| | | cccccuugccucugagaggaugcucccucccucacuaggccucccucuuccccagggcuucaa |
| | | guuccucaaggauuauacacaucuucucccacugagaccaggccaggcaguccucugcuucug |
| | | cccagccuguguauguuccugcuugguagcucagucucuggaagcucccuggggucugggu |
| | | uaguugggacugcuggucuuccuauggaguuacccuccccuucaacuucuucaauccuuccc |
| | | cuaauucaaccacagguauccagacuucaguccaaugguugaguguaaauauuggcaucugu |
| | | cucugucagcuguuguuaggggcucagaggacagccaugcuaggcuccugccuacaagcagc |
| | | acaccauaacaucaguaauagugucaggccuuuaaugaauaaugcuacguauauaagguugu |
| | | uagauuauacuucaacuuugaucuuuuagaauauuauuaaauccagucguuuauuuuuuaua |
| | | uguaauauugacuuuccauaacaaaugagucuauuuuccuuuuguguagaaauaacuuuauc |
| | | aauuauuguuaauaaugcuuuugucaauuauuguugauaugcuucucuuuuuuaaaacugg |
| | | agucaucaaaacaaaaauucuggguagauauuacgaagcugacuccuuggucagcuuggcaca |
| | | uagugagaccacaaauaucucaaggucacggcaauuccucaccaccaguuuggcauugugaag |
| | | ucaaaaccaaccuucuguugauucugguuuuuguauuucuaguaugagacauuuucuacuuu |
| | | guaagaguauauaacuguggauggcggcgagguugggcaugaugaugauuguaagcgggaa |
| | | gugagcuagaguaucuucagaaacucucacuuuauccuccuuggcagcauagaaccgcaaucg |
| | | cuguguccgagugucaaccaggcagucauuuuguuuuggguuuuuugucacucuuucaaag |
| | | caugugcuucuacgcaacacuaccaaacacagcaugcugcauagugcuugagaaggaguuaga |
| | | aaguaacaaacgaguuaucaucacguugcccuuuguguuuugcaugucuuaugcacacuuuu |
| | | ggcugacagcuuuugaacauuuauuguauuucaaauuuccaguccaaauuuuuuuuucaacu |
| | | ugugaaauugaacggaaugaaccgaugucgugaauaccuagggucaaauaaaacuuguauuu |
| | | aaauucguaguuuuaauuucccaagcugggaaaaucguaaaaaccuuuuccaaagaacucaag |
| | | ucuuaguugcuagggaaacaggcagugagcaucauauacaaaaaguaacaccaaauguucugu |
| | | cauaucagcuuucuaacuaauaauaaacuauauauuucuauuuuauauaggauaaucuugcu |
| | | ccaacuuggaugggguggagcggugguuccuccccucagcccuuuauuauggguacuguauu |
| | | accccuuuugcuaccuuuaauccuugcacugugacuuauguguagugggauugagggaggga |
| | | gugggaaggguacaauugcaccacaguagggacaauacaggauuuauuuccaaauccacuacu |
| | | uuuaaugagcuuaaacuucuuuugggaaaaaaaaaguuaucucugacuuaccaucuguggau |
| | | uauaaccccagaaguacauaucuuuauuacguuucacugaauaugauuuagcuauuuauacu |
| | | ucauuguccauuuauggggaaauuacucaauuggugagggugggggacccugguguaggau |
| | | gcugaugaaaacguuuucauuugucaagcucaugguagugacagagcauauaguccuuauuu |
| | | uuucaacacacugcucuggucccucaaugggccagucacauuccaucaguugaucguugaug |
| | | ugugcgagcaguggcuaaagguacaacaggccagguaucucaggguugccaaugguuaugau |
| | | cauucucaucuuuauugcauaaaaauguguuauuugcagaaaguagcaaggcaagaucccug |
| | | ugaaacaagggaauacaaaaaaaaaaaaagaugugcuuuaaguuauaaaaccaaaacaugugaa |
| | | aagucaacuucauugaaguauaaagaauaggauaugcaugaaaaacaaaaaaaucaugagcac |
| | | uaagaaauugguguauaagccaacuccuuguaagcuaccccaauuaacuucccagaaucuuag |
| | | aaggcaucacagugcaccccaaaauaaaaagccaaacugacacuucugcuuccucuuaaaaugu |
| | | aggagucuuggauaagaaagauaauuuuuauuguuuggaagaaaaaaaaauuguuuggauaa |
| | | uugaggcauuuaucuaucaaaaauauuuaucuuaauaaaauuucacaacacugauuuaguug |
| | | uuggcuuuucuaaaaauuuuuuauauuucauauuaagaacucaugauuuuuacuuuccauuu |
| | | uuuaaauucuuauucacauaugguuuuucucuauuucuuagaaaagcuauagaacccauggu |
| | | uuccggugacuuaaaaaacuaaucuaaaugucuucacuuagaugauacuuucaaaugcacuga |
| | | aauuucuaauaucaacaagaauauuugccugguccuaauuuuucacugauuuaauaaaaagua |
| | | ugaacccuaaagaagaaauagacuugaagaacugguugugugacaauacagaaauucugcugg |
| | | gagauguccuuuuaaaacauuguuagaagagacaaccucuacaauccacccauuaagcauacu |
| | | ucucucuuagacaucuccuuuuauguaccuuauaaccucaauguguucuuuccaauugacuu |
| | | agaccaacacuucccagcgcaucccacaugggagccaauuacugacucucccuagagacugcaa |
| | | agaauuaauauuguagaaccaagggaugguugggcucuugggagaggcaauccguuugugau |
| | | cuuuugcucuggauguuaaugaaaucgcaacuuuaaguggauuuucaguggcaaauccucug |
| | | auccuaugccaaauguucucuaagacaaacauccuuguaaaauaaaugucucacugggccaaa |
| | | ucuauggcaaauuugcacguuuuccugaacugcauuccuauauaguauuugccauccugaau |
| | | ucacuaaugggcauuacuuuuaauucaaaaccagucccuucuucaaaggaaaucucucccauu |
| | | uauuacauuaugcaaacugcuuucuuaugcagugguuaaauccuuagccaggcaaguaugag |
| | | gacuggaauuuggauauccagaacccucagaaaugucggaugggcauaguagcuuacaugua |
| | | auuccagagcuagaaagaugaaacuagcccuguccucaagcucugaauucaguuggugcaaua |
| | | aauaagaaagaauccccccccccgaccccuacaucucuuuccucuacaucuauacauguauuuc |
| | | ccauacagcucuaugcuuccacauauaugcucacauaugugcaugcacacuugcacacauaug |
| | | uacacuugacacauugaagcaucauaaucuaacaauuggaauauaagaaaauauuuaacuuuc |
| | | acacagagcagucagagaaaaccauaagagguugaaacucuugaaaaaacuugcaggauaaaca |
| | | gaaaagaguaugagaugccaauucuggucuacuuucugaaccuaacuuguuuuaccuucauu |
| | | agucuaauuuuccaaaugaaccccaagcaccaaauuguccuuauugcucuuuccaguacuaaa |
| | | uuauaauuccucaauucgaaggcaaacacucucaucuuuguuaaggauguguagaguuagac |
| | | ucaauaaacgacauguauauuugagcuaaagccuggaggagggagauuauuucaagggcaag |
| | | uacuuggcagggaguuucaaagaaagaaggcucucaauucucagacuaacaccuuagcgugga |
| | | gugacugucacagaggagggugaaguguaugucaccaguuagggaagcugaaaggggaaaug |
| | | uaucaggcuugugagaauccuucagcagccaagucuagcaccugagcacaauccccagaacug |
| | | accccacaugguggaaaggagaggaauaauuccugcaaauuuuccugugaccuccacccaagu |
| | | gcuauagaaaaugcaugcaugcccacaugcacacacaaauaaacauaguugcaaacuguuuug |
| | | aggaaaauaaccucacaaacugucgagugauguaaaugccaaagaaagagaaauguuuucuaa |
| | | uggcuagagaaccauuaaggaauuuuucaaaaugggacaugggauagauaaauuuaguaucc |
| | | auacugaaagaaggcaagcaaauaaaaucugauaagaauguaauucuuaguaaccgaggacag |
| | | agcgaagauagagaacagggccaauggccaagguggaaagguuugaaggaagcagcaugaaac |
| | | cuacagacuuguaccaaaauguucagugucaugaguguuaaaagugaaaagcuugcauguua |
| | | guauggauuucauauccucggcagacagagcaccucacugugagugggagaugaaguauuca |
| | | gaaaugagaaacaacuacucaauuucaguguucauaucucaaauccaauaaacaacuuuaggg |
| | | guacaauuuuuuaaaaaauuacauuaaaauguuuuuaaaucucuucuuaauaauuuaaaaau |
| | | uaaauugaaaauaacuuuaaaaaguaauauauacaggaaagccugugugcuaauuuuuuagg |
| | | gaggccauaaagggagauaguugcucauuaauuucuacacaucagccuaucuuuggcuucug |
| | | ccuugauagcgcacucugaauuaucuucuucauguucaucccucaucuuuauuguuacuggu |
| | | uucauuucccuuggccacauagcccacuauuuuguauuccccaauggauauuguuccuuaca |
| | | aaguucagccagggcucagaaguacaaggaauuggcucuuauacuucugucagacaggcaaaa |
| | | acuucuaaaauuauacuauaauaaaaaucaaagagaugauauucauaauuaaacuaacaaaagu |
| | | ggcaggcccccccucccccaacaugaguagaauuaaucugacguccauguucaagucugaaac |
| | | acacuugccaauuaagagcacauuagggccagccuuuaucucccucuuaguuacuaaugugca |
| | | guucaauggugagcuauagagaaggaagccaagacuaccauaugucaaauauaaaaaaaaaaa |
| | | aucccauuuuaaaucuguagucccgaauuaaggacaagagagagggaaauaucuuugacauua |
| | | gaaaauggagaaaauauuuuagcacaggacuuuacucagucacaucagaguugauaaguacgu |
| | | augacaucccucuuuuuccuguuuuccugagaaaaugaucucucuaguguuucauuuaagau |
| | | aaguuuauugaauuaaacucaguaaaugaaacaacugacaugacuggagcuugaaauaaacga |
| | | ugugaugaucuacugaaauacaugaugcuaaauugucuugcuucuuaugcaaaaacuacuau |
| | | uaguuauagcaaugcauggauaauuaaggccaaaaauauauuagauguuaaaaauaguuuua |
| | | uauuuauacaucugaauuuuaauuuauauuuaaaguauauugguccaaucaauucaugccca |
| | | aauguuuuaguucuauucuuugagauacuguuuuguuuugggauuuuuuuuuaugagcuaa |
| | | ucucuugccuaggaguuccuacuucucucuccuccuuuuauuuuuucuaauaaacuacacau |
| | | gugucuucauccaggagcuaacuucucccauuuugcuuuuccuuuagcaccuuuuuuauauu |
| | | agauuucuuucuuuucuccaucucuuugcauauugccuauauuucuuuuccuaagcauaaua |
| | | uuuaaaaaagacugaguuuuauguuaagauuauuucugcuuugcucuuacacagauaggaua |
| | | aguagucuugauagaaaauaaaucaaugauuccuagggggaugucuuuuugcuuuuaaucaa |
| | | uaaggauucugacuucucuuucucuccauuuguguauuag |
| SEQ ID | Exon 22 pre- | GUGGUUGUGAAUGCCCUGUUAGGAGCAAUUCCAUCCAUCAU |
| NO. 19 | mRNA | GAAUGUGCUUCUGGUUUGCCUUAUAUUCUGGCUAAUUUUCA |
| | | GCAUCAUGGGCGUAAAUUUGUUUGCUGGCAAAUUCUACCAC |
| | | UGUGUUAACACCACAACUGGUGACAUAUUUGAGAUCAGCGA |
| | | AGUCAAUAAUCAUUCUGAUUGCCUAAAACUAAUAGAAAGAA |
| | | AUGAGACCGCCCGGUGGAAAAAUGUGAAAGUAAACUUUGAU |
| | | AAUGUAGGAUUUGGGUAUCUUUCUUUGCUUCAAGUU |
| SEQ ID | Exon 21x pre- | gauaaucuugcuccaacuuggaugggguggagcggugguuccuccccucagcccuuuauuau |
| NO. 20 | mRNA | gg |

### Example 14: SCN1A Exon 20x Region ASO Walk

[0656] An ASO walk was performed for SCN1A exon 20x region targeting sequences immediately upstream of the 3′ splice site, across the 3′splice site, exon 20x, across the 5′ splice site, and downstream of the 5′ splice site using 2′-MOE ASOs, PS backbone. ASOs were designed to cover these regions by shifting 5 nucleotides at a time. A list of ASOs targeting SCN1A is summarized in Table 3. Sequences of ASOs are summarized in Table 4a and Table 4b and Table 5a and Table 5b.

TABLE 3
List of ASOs targeting SCN1A.

| Gene | Pre-mRNA | ASOs | |
|---|---|---|---|
| SEQ ID NO. | SEQ ID NO. | SEQ ID NO. | NIE |
| SEQ ID NO. 1 | SEQ ID NO. 2 | SEQ ID NOs: | Exon 20x |
| | | 21-67, 210-256, 304- | |
| | | 1099 | |
| SEQ ID NO. 11 | SEQ ID NO. 12 | SEQ ID NOs: | Exon 21x |
| | | 68-114, 257-303 | |

TABLE 4a
Sequences of ASOs targeting human SCN1A.

| SEQ | | |
|---|---|---|
| ID NO. | Sequence name | ASO sequence |
| 21 | SCN1A-IVS19X − 81 | GATGCTCTCCGTCTGTTT |
| 22 | SCN1A-IVS19X − 76 | TTCATGATGCTCTCCGTC |
| 23 | SCN1A-IVS19X − 71 | TTTTGTTCATGATGCTCT |
| 24 | SCN1A-IVS19X − 66 | TTACTTTTTGTTCATGAT |
| 25 | SCN1A-IVS19X − 61 | TGGTGTTACTTTTTGTTC |
| 26 | SCN1A-IVS19X − 56 | ACATTTGGTGTTACTTTT |
| 27 | SCN1A-IVS19X − 51 | ACAGAACATTTGGTGTTA |
| 28 | SCN1A-IVS19X − 46 | ATATGACAGAACATTTGG |
| 29 | SCN1A-IVS19X − 41 | ATCTGATATGACAGAACA |
| 30 | SCN1A-IVS19X − 36 | TAGAAATCTGATATGACA |
| 31 | SCN1A-IVS19X − 31 | TTAGTTAGAAATCTGATA |
| 32 | SCN1A-IVS19X − 26 | TGTTATTAGTTAGAAATC |
| 33 | SCN1A-IVS19X − 21 | TAGTTTGTTATTAGTTAG |
| 34 | SCN1A-IVS19X − 16 | ATATATAGTTTGTTATTA |
| 35 | SCN1A-IVS19X − 11 | TAGAAATATATAGTTTGT |
| 36 | SCN1A-IVS19X − 6 | CAAAATAGAAATATATAG |
| 37 | SCN1A-IVS19X − 3 | ATACAAAATAGAAATATA |
| 38 | SCN1A-IVS19X − 1 | CTATACAAAATAGAAATA |
| 39 | SCN1A-I19X/E20X + 2 | TCCTATACAAAATAGAAA |
| 40 | SCN1A-I19X/E20X + 4 | TATCCTATACAAAATAGA |
| 41 | SCN1A-I19X/E20X + 6 | ATTATCCTATACAAAATA |
| 42 | SCN1A-Ex20X + 1 | AGTTGGAGCAAGATTATC |
| 43 | SCN1A-Ex20X + 6 | ATCCAAGTTGGAGCAAGA |
| 44 | SCN1A-Ex20X + 11 | ACCCCATCCAAGTTGGAG |
| 45 | SCN1A-Ex20X + 16 | GCTCCACCCCATCCAAGT |
| 46 | SCN1A-Ex20X + 21 | CCAGCGCTCCACCCCATC |
| 47 | SCN1A-Ex20X − 24 | GAACCAGCGCTCCACCCC |
| 48 | SCN1A-Ex20X − 19 | GGGAGGAACCAGCGCTCC |
| 49 | SCN1A-Ex20X − 3 | ATAATAAAGGGCTCAGGG |
| 50 | SCN1A-Ex20X − 1 | CCATAATAAAGGGCTCAG |
| 51 | SCN1A-E20X/I20X − 6 | GTAATACAGTACCCATAA |
| 52 | SCN1A-E20X/I20X − 4 | GGGTAATACAGTACCCAT |
| 53 | SCN1A-IVS20X + 13 | TTAAAGGTAGCAAAAGGG |
| 54 | SCN1A-IVS20X + 18 | AAGGATTAAAGGTAGCAA |
| 55 | SCN1A-IVS20X + 23 | AGTGCAAGGATTAAAGGT |
| 56 | SCN1A-IVS20X + 28 | GTCACAGTGCAAGGATTA |
| 57 | SCN1A-IVS20X + 33 | CATAAGTCACAGTGCAAG |
| 58 | SCN1A-IVS20X + 38 | CTACACATAAGTCACAGT |
| 59 | SCN1A-IVS20X + 43 | CCCCACTACACATAAGTC |
| 60 | SCN1A-IVS20X + 48 | CCTCACCCCACTACACAT |
| 61 | SCN1A-IVS20X + 53 | CCCTCCCTCACCCCACTA |
| 62 | SCN1A-IVS20X + 58 | CCAATCCCTCCCTCACCC |
| 63 | SCN1A-IVS20X + 63 | CCTTCCCAATCCCTCCCT |
| 64 | SCN1A-IVS20X + 68 | AGTACCCTTCCCAATCCC |
| 65 | SCN1A-IVS20X + 73 | ATAATAGTACCCTTCCCA |
| 66 | SCN1A-IVS20X + 78 | GTGCAATAATAGTACCCT |
| 67 | SCN1A-IVS20X + 83 | CTGTGGTGCAATAATAGT |

TABLE 4b
Sequences of ASOs targeting human SCN1A.

| SEQ | | |
|---|---|---|
| ID NO. | Sequence name | ASO sequence |
| 210 | SCN1A-IVS19X − 81 | GAUGCUCUCCGUCUGUUU |
| 211 | SCN1A-IVS19X − 76 | UUCAUGAUGCUCUCCGUC |
| 212 | SCN1A-IVS19X − 71 | UUUUGUUCAUGAUGCUCU |
| 213 | SCN1A-IVS19X − 66 | UUACUUUUUGUUCAUGAU |
| 214 | SCN1A-IVS19X − 61 | UGGUGUUACUUUUUGUUC |
| 215 | SCN1A-IVS19X − 56 | ACAUUUGGUGUUACUUUU |
| 216 | SCN1A-IVS19X − 51 | ACAGAACAUUUGGUGUUA |
| 217 | SCN1A-IVS19X − 46 | AUAUGACAGAACAUUUGG |
| 218 | SCN1A-IVS19X − 41 | AUCUGAUAUGACAGAACA |
| 219 | SCN1A-IVS19X − 36 | UAGAAAUCUGAUAUGACA |
| 220 | SCN1A-IVS19X − 31 | UUAGUUAGAAAUCUGAUA |
| 221 | SCN1A-IVS19X − 26 | UGUUAUUAGUUAGAAAUC |
| 222 | SCN1A-IVS19X − 21 | UAGUUUGUUAUUAGUUAG |
| 223 | SCN1A-IVS19X − 16 | AUAUAUAGUUUGUUAUUA |
| 224 | SCN1A-IVS19X − 11 | UAGAAAUAUAUAGUUUGU |
| 225 | SCN1A-IVS19X − 6 | CAAAAUAGAAAUAUAUAG |
| 226 | SCN1A-IVS19X − 3 | AUACAAAAUAGAAAUAUA |
| 227 | SCN1A-IVS19X − 1 | CUAUACAAAAUAGAAAUA |
| 228 | SCN1A-I19X/E20X + 2 | UCCUAUACAAAAUAGAAA |
| 229 | SCN1A-I19X/E20X + 4 | UAUCCUAUACAAAAUAGA |
| 230 | SCN1A-I19X/E20X + 6 | AUUAUCCUAUACAAAAUA |
| 231 | SCN1A-Ex20X + 1 | AGUUGGAGCAAGAUUAUC |
| 232 | SCN1A-Ex20X + 6 | AUCCAAGUUGGAGCAAGA |
| 233 | SCN1A-Ex20X + 11 | ACCCCAUCCAAGUUGGAG |
| 234 | SCN1A-Ex20X + 16 | GCUCCACCCCAUCCAAGU |
| 235 | SCN1A-Ex20X + 21 | CCAGCGCUCCACCCCAUC |
| 236 | SCN1A-Ex20X − 24 | GAACCAGCGCUCCACCCC |
| 237 | SCN1A-Ex20X − 19 | GGGAGGAACCAGCGCUCC |
| 238 | SCN1A-Ex20X − 3 | AUAAUAAAGGGCUCAGGG |
| 239 | SCN1A-Ex20X − 1 | CCAUAAUAAAGGGCUCAG |
| 240 | SCN1A-E20X/I20X − 6 | GUAAUACAGUACCCAUAA |
| 241 | SCN1A-E20X/I20X − 4 | GGGUAAUACAGUACCCAU |
| 242 | SCN1A-IVS20X + 13 | UUAAAGGUAGCAAAAGGG |
| 243 | SCN1A-IVS20X + 18 | AAGGAUUAAAGGUAGCAA |
| 244 | SCN1A-IVS20X + 23 | AGUGCAAGGAUUAAAGGU |
| 245 | SCN1A-IVS20X + 28 | GUCACAGUGCAAGGAUUA |
| 246 | SCN1A-IVS20X + 33 | CAUAAGUCACAGUGCAAG |
| 247 | SCN1A-IVS20X + 38 | CUACACAUAAGUCACAGU |
| 248 | SCN1A-IVS20X + 43 | CCCCACUACACAUAAGUC |
| 249 | SCN1A-IVS20X + 48 | CCUCACCCCACUACACAU |
| 250 | SCN1A-IVS20X + 53 | CCCUCCCUCACCCCACUA |
| 251 | SCN1A-IVS20X + 58 | CCAAUCCCUCCCUCACCC |
| 252 | SCN1A-IVS20X + 63 | CCUUCCCAAUCCCUCCCU |
| 253 | SCN1A-IVS20X + 68 | AGUACCCUUCCCAAUCCC |
| 254 | SCN1A-IVS20X + 73 | AUAAUAGUACCCUUCCCA |
| 255 | SCN1A-IVS20X + 78 | GUGCAAUAAUAGUACCCU |
| 256 | SCN1A-IVS20X + 83 | CUGUGGUGCAAUAAUAGU |

TABLE 5a
Sequences of ASOs targeting mouse SCN1A.

| SEQ ID | | |
|---|---|---|
| NO. | Sequence name | ASO sequence |
| 68 | mScn1a-IVS20X − 81 | GATGCTCACTGCCTGTTT |
| 69 | mScn1a-IVS20X − 76 | TATATGATGCTCACTGCC |
| 70 | mScn1a-IVS20X − 71 | TTTTGTATATGATGCTCA |
| 71 | mScn1a-IVS20X − 66 | TTACTTTTTGTATATGAT |
| 72 | mScn1a-IVS20X − 61 | TGGTGTTACTTTTTGTAT |
| 73 | mScn1a-IVS20X − 56 | ACATTTGGTGTTACTTTT |
| 74 | mScn1a-IVS20X − 51 | ACAGAACATTTGGTGTTA |
| 75 | mScn1a-IVS20X − 46 | ATATGACAGAACATTTGG |
| 76 | mScn1a-IVS20X − 41 | AGCTGATATGACAGAACA |
| 77 | mScn1a-IVS20X − 36 | TAGAAAGCTGATATGACA |
| 78 | mScn1a-IVS20X − 31 | TTAGTTAGAAAGCTGATA |
| 79 | mScn1a-IVS20X − 26 | TATTATTAGTTAGAAAGC |
| 80 | mScn1a-IVS20X − 21 | TAGTTTATTATTAGTTAG |
| 81 | mScn1a-IVS20X − 16 | ATATATAGTTTATTATTA |
| 82 | mScn1a-IVS20X − 11 | TAGAAATATATAGTTTAT |
| 83 | mScn1a-IVS20X − 6 | TAAAATAGAAATATATAG |
| 84 | mScn1a-IVS20X − 3 | ATATAAAATAGAAATATA |
| 85 | mScn1a-IVS20X − 1 | CTATATAAAATAGAAATA |
| 86 | mScn1a-I20X/E21X + 2 | TCCTATATAAAATAGAAA |
| 87 | mScn1a-I20X/E21X + 4 | TATCCTATATAAAATAGA |
| 88 | mScn1a-I20X/E21X + 6 | ATTATCCTATATAAAATA |
| 89 | mScn1a-Ex21X + 1 | AGTTGGAGCAAGATTATC |
| 90 | mScn1a-Ex21X + 6 | ATCCAAGTTGGAGCAAGA |
| 91 | mScn1a-Ex21X + 11 | ACCCCATCCAAGTTGGAG |
| 92 | mScn1a-Ex21X + 16 | GCTCCACCCCATCCAAGT |
| 93 | mScn1a-Ex21X + 21 | CCACCGCTCCACCCCATC |
| 94 | mScn1a-Ex21X − 24 | GAACCACCGCTCCACCCC |
| 95 | mScn1a-Ex21X − 19 | GGGAGGAACCACCGCTCC |
| 96 | mScn1a-Ex21X − 3 | ATAATAAAGGGCTGAGGG |
| 97 | mScn1a-Ex21X − 1 | CCATAATAAAGGGCTGAG |
| 98 | mScn1a-E21X/I21X − 6 | GTAATACAGTACCCATAA |
| 99 | mScn1a-E21X/I21X − 4 | GGGTAATACAGTACCCAT |
| 100 | mScn1a-IVS21X + 13 | TTAAAGGTAGCAAAAGGG |
| 101 | mScn1a-IVS21X + 18 | AAGGATTAAAGGTAGCAA |
| 102 | mScn1a-IVS21X + 23 | AGTGCAAGGATTAAAGGT |
| 103 | mScn1a-IVS21X + 28 | GTCACAGTGCAAGGATTA |
| 104 | mScn1a-IVS21X + 33 | CATAAGTCACAGTGCAAG |
| 105 | mScn1a-IVS21X + 38 | CTACACATAAGTCACAGT |
| 106 | mScn1a-IVS21X + 43 | TCCCACTACACATAAGTC |
| 107 | mScn1a-IVS21X + 48 | CTCAATCCCACTACACAT |
| 108 | mScn1a-IVS21X + 53 | CCTCCCTCAATCCCACTA |
| 109 | mScn1a-IVS21X + 58 | CACTCCCTCCCTCAATCC |
| 110 | mScn1a-IVS21X + 63 | CTTCCCACTCCCTCCCTC |
| 111 | mScn1a-IVS21X + 68 | GTACCCTTCCCACTCCCT |
| 112 | mScn1a-IVS21X + 73 | CAATTGTACCCTTCCCAC |
| 113 | mScn1a-IVS21X + 78 | TGGTGCAATTGTACCCTT |
| 114 | mScn1a-IVS21X + 83 | TACTGTGGTGCAATTGTA |

TABLE 5b
Sequences of ASOs targeting mouse SCN1A.

| SEQ ID | | |
|---|---|---|
| NO. | Sequence name | ASO sequence |
| 257 | mScn1a-IVS20X − 81 | GAUGCUCACUGCCUGUUU |
| 258 | mScn1a-IVS20X − 76 | UAUAUGAUGCUCACUGCC |
| 259 | mScn1a-IVS20X − 71 | UUUUGUAUAUGAUGCUCA |
| 260 | mScn1a-IVS20X − 66 | UUACUUUUUGUAUAUGAU |
| 261 | mScn1a-IVS20X − 61 | UGGUGUUACUUUUUGUAU |
| 262 | mScn1a-IVS20X − 56 | ACAUUUGGUGUUACUUUU |
| 263 | mScn1a-IVS20X − 51 | ACAGAACAUUUGGUGUUA |
| 264 | mScn1a-IVS20X − 46 | AUAUGACAGAACAUUUGG |
| 265 | mScn1a-IVS20X − 41 | AGCUGAUAUGACAGAACA |
| 266 | mScn1a-IVS20X − 36 | UAGAAAGCUGAUAUGACA |
| 267 | mScn1a-IVS20X − 31 | UUAGUUAGAAAGCUGAUA |
| 268 | mScn1a-IVS20X − 26 | UAUUAUUAGUUAGAAAGC |
| 269 | mScn1a-IVS20X − 21 | UAGUUUAUUAUUAGUUAG |
| 270 | mScn1a-IVS20X − 16 | AUAUAUAGUUUAUUAUUA |
| 271 | mScn1a-IVS20X − 11 | UAGAAAUAUAUAGUUUAU |
| 272 | mScn1a-IVS20X − 6 | UAAAAUAGAAAUAUAUAG |
| 273 | mScn1a-IVS20X − 3 | AUAUAAAAUAGAAAUAUA |
| 274 | mScn1a-IVS20X − l | CUAUAUAAAAUAGAAAUA |
| 275 | mScn1a-I20X/E21X + 2 | UCCUAUAUAAAAUAGAAA |
| 276 | mScn1a-I20X/E21X + 4 | UAUCCUAUAUAAAAUAGA |
| 277 | mScn1a-I20X/E21X + 6 | AUUAUCCUAUAUAAAAUA |
| 278 | mScn1a-Ex21X + 1 | AGUUGGAGCAAGAUUAUC |
| 279 | mScn1a-Ex21X + 6 | AUCCAAGUUGGAGCAAGA |
| 280 | mScn1a-Ex21X + 11 | ACCCCAUCCAAGUUGGAG |
| 281 | mScn1a-Ex21X + 16 | GCUCCACCCCAUCCAAGU |
| 282 | mScn1a-Ex21X + 21 | CCACCGCUCCACCCCAUC |
| 283 | mScn1a-Ex21X − 24 | GAACCACCGCUCCACCCC |
| 284 | mScn1a-Ex21X − 19 | GGGAGGAACCACCGCUCC |
| 285 | mScn1a-Ex21X − 3 | AUAAUAAAGGGCUGAGGG |
| 286 | mScn1a-Ex21X − l | CCAUAAUAAAGGGCUGAG |
| 287 | mScn1a-E21X/I21X − 6 | GUAAUACAGUACCCAUAA |
| 288 | mScn1a-E21X/I21X − 4 | GGGUAAUACAGUACCCAU |
| 289 | mScn1a-IVS21X + 13 | UUAAAGGUAGCAAAAGGG |
| 290 | mScn1a-IVS21X + 18 | AAGGAUUAAAGGUAGCAA |
| 291 | mScn1a-IVS21X + 23 | AGUGCAAGGAUUAAAGGU |
| 292 | mScn1a-IVS21X + 28 | GUCACAGUGCAAGGAUUA |
| 293 | mScn1a-IVS21X + 33 | CAUAAGUCACAGUGCAAG |
| 294 | mScn1a-IVS21X + 38 | CUACACAUAAGUCACAGU |
| 295 | mScn1a-IVS21X + 43 | UCCCACUACACAUAAGUC |
| 296 | mScn1a-IVS21X + 48 | CUCAAUCCCACUACACAU |
| 297 | mScn1a-IVS21X + 53 | CCUCCCUCAAUCCCACUA |
| 298 | mScn1a-IVS21X + 58 | CACUCCCUCCCUCAAUCC |
| 299 | mScn1a-IVS21X + 63 | CUUCCCACUCCCUCCCUC |
| 300 | mScn1a-IVS21X + 68 | GUACCCUUCCCACUCCCU |
| 301 | mScn1a-IVS21X + 73 | CAAUUGUACCCUUCCCAC |
| 302 | mScn1a-IVS21X + 78 | UGGUGCAAUUGUACCCUU |
| 303 | mScn1a-IVS21X + 83 | UACUGUGGUGCAAUUGUA |

[0657] Sequences of ASOs are summarized in Table 6a and Table 6b.

TABLE 6a
Sequences of ASOs targeting human SCN1A.

| ASO ID | Sequence 5′-3′ | SEQ ID NO: |
|---|---|---|
| 1 | TTGGAGCAAGATTATC | 304 |
| 2 | GTTGGAGCAAGATTATC | 305 |
| 3 | GTTGGAGCAAGATTAT | 306 |
| 4 | AGTTGGAGCAAGATTAT | 307 |
| 5 | AGTTGGAGCAAGATTA | 308 |
| 6 | GATTATCCTATACAAAAT | 309 |
| 7 | AGATTATCCTATACAAAA | 310 |
| 8 | AAGATTATCCTATACAAA | 311 |
| 9 | CAAGATTATCCTATACAA | 312 |
| 10 | GCAAGATTATCCTATACA | 313 |
| 11 | AGCAAGATTATCCTATAC | 314 |
| 12 | GAGCAAGATTATCCTATA | 315 |
| 13 | GGAGCAAGATTATCCTAT | 316 |
| 14 | TGGAGCAAGATTATCCTA | 317 |
| 15 | GTTGGAGCAAGATTATCC | 318 |
| 16 | TTGGAGCAAGATTATCCT | 319 |
| 18 | AAGTTGGAGCAAGATTAT | 320 |
| 19 | CAAGTTGGAGCAAGATTA | 321 |
| 20 | CCAAGTTGGAGCAAGATT | 322 |
| 21 | TCCAAGTTGGAGCAAGAT | 323 |
| 22 | AGTACCCATAATAAAGGG | 324 |
| 23 | AATACAGTACCCATAATA | 325 |
| 24 | ATTAAAGGTAGCAAAAGG | 326 |
| 25 | GATTAAAGGTAGCAAAAG | 327 |
| 26 | GGATTAAAGGTAGCAAAA | 328 |
| 27 | AGGATTAAAGGTAGCAAA | 329 |
| 29 | CAAGGATTAAAGGTAGCA | 330 |
| 30 | GCAAGGATTAAAGGTAGC | 331 |
| 31 | TGCAAGGATTAAAGGTAG | 332 |
| 32 | GTGCAAGGATTAAAGGTA | 333 |
| 33 | AGTCACAGTGCAAGGATT | 334 |
| 34 | AAGTCACAGTGCAAGGAT | 335 |
| 35 | TAAGTCACAGTGCAAGGA | 336 |
| 36 | ATAAGTCACAGTGCAAGG | 337 |
| 38 | ACATAAGTCACAGTGCAA | 338 |
| 39 | CACATAAGTCACAGTGCA | 339 |
| 40 | ACACATAAGTCACAGTGC | 340 |
| 41 | TACACATAAGTCACAGTG | 341 |

TABLE 6b
Sequences of ASOs targeting human SCN1A.

| ASO ID | Sequence 5′-3′ | SEQ ID NO: |
|---|---|---|
| 1_U | UUGGAGCAAGAUUAUC | 342 |
| 2_U | GUUGGAGCAAGAUUAUC | 343 |
| 3_U | GUUGGAGCAAGAUUAU | 344 |
| 4_U | AGUUGGAGCAAGAUUAU | 345 |
| 5_U | AGUUGGAGCAAGAUUA | 346 |
| 6_U | GAUUAUCCUAUACAAAAU | 347 |
| 7_U | AGAUUAUCCUAUACAAAA | 348 |
| 8_U | AAGAUUAUCCUAUACAAA | 349 |
| 9_U | CAAGAUUAUCCUAUACAA | 350 |
| 10_U | GCAAGAUUAUCCUAUACA | 351 |
| 11_U | AGCAAGAUUAUCCUAUAC | 352 |
| 12_U | GAGCAAGAUUAUCCUAUA | 353 |
| 13_U | GGAGCAAGAUUAUCCUAU | 354 |
| 14_U | UGGAGCAAGAUUAUCCUA | 355 |
| 15_U | GUUGGAGCAAGAUUAUCC | 356 |
| 16_U | UUGGAGCAAGAUUAUCCU | 357 |
| 18_U | AAGUUGGAGCAAGAUUAU | 358 |
| 19_U | CAAGUUGGAGCAAGAUUA | 359 |
| 20_U | CCAAGUUGGAGCAAGAUU | 360 |
| 21_U | UCCAAGUUGGAGCAAGAU | 361 |
| 22_U | AGUACCCAUAAUAAAGGG | 362 |
| 23_U | AAUACAGUACCCAUAAUA | 363 |
| 24_U | AUUAAAGGUAGCAAAAGG | 364 |
| 25_U | GAUUAAAGGUAGCAAAAG | 365 |
| 26_U | GGAUUAAAGGUAGCAAAA | 366 |
| 27_U | AGGAUUAAAGGUAGCAAA | 367 |
| 29_U | CAAGGAUUAAAGGUAGCA | 368 |
| 30_U | GCAAGGAUUAAAGGUAGC | 369 |
| 31_U | UGCAAGGAUUAAAGGUAG | 370 |
| 32_U | GUGCAAGGAUUAAAGGUA | 371 |
| 33_U | AGUCACAGUGCAAGGAUU | 372 |
| 34_U | AAGUCACAGUGCAAGGAU | 373 |
| 35_U | UAAGUCACAGUGCAAGGA | 374 |
| 36_U | AUAAGUCACAGUGCAAGG | 375 |
| 38_U | ACAUAAGUCACAGUGCAA | 376 |
| 39_U | CACAUAAGUCACAGUGCA | 377 |
| 40_U | ACACAUAAGUCACAGUGC | 378 |
| 41_U | UACACAUAAGUCACAGUG | 379 |

[0658] Sequences of ASOs are summarized in Table 7.

TABLE 7
Sequences of ASOs targeting human SCN1A.

| SEQUENCE | Chr2 | Chr2 | SEQ ID | | SEQ ID | |
|---|---|---|---|---|---|---|
| NAME | Start | End | NO: | ASO sequence | NO: | ASO sequence |
| SCN1A- | 166864788 | 166864806 | 380 | ATGAATTTAATA | 740 | AUGAAUUUAAUA |
| IVS22 − 986 | | | | AACTTT | | AACUUU |
| SCN1A- | 166864783 | 166864801 | 381 | GACCAATGAATT | 741 | GACCAAUGAAUU |
| IVS22 − 981 | | | | TAATAA | | UAAUAA |
| SCN1A- | 166864778 | 166864796 | 382 | CACTTGACCAAT | 742 | CACUUGACCAAU |
| IVS22 − 976 | | | | GAATTT | | GAAUUU |
| SCN1A- | 166864773 | 166864791 | 383 | CTGAGCACTTGA | 743 | CUGAGCACUUGA |
| IVS22 − 971 | | | | CCAATG | | CCAAUG |
| SCN1A- | 166864768 | 166864786 | 384 | AATATCTGAGCA | 744 | AAUAUCUGAGCA |
| IVS22 − 966 | | | | CTTGAC | | CUUGAC |
| SCN1A- | 166864763 | 166864781 | 385 | ATGGAAATATCT | 745 | AUGGAAAUAUCU |
| IVS22 − 961 | | | | GAGCAC | | GAGCAC |
| SCN1A- | 166864758 | 166864776 | 386 | AATGTATGGAAA | 746 | AAUGUAUGGAAA |
| IVS22 − 956 | | | | TATCTG | | UAUCUG |
| SCN1A- | 166864753 | 166864771 | 387 | AGTGTAATGTAT | 747 | AGUGUAAUGUAU |
| IVS22 − 951 | | | | GGAAAT | | GGAAAU |
| SCN1A- | 166864748 | 166864766 | 388 | AATGAAGTGTAA | 748 | AAUGAAGUGUAA |
| IVS22 − 946 | | | | TGTATG | | UGUAUG |
| SCN1A- | 166864743 | 166864761 | 389 | ATAGAAATGAAG | 749 | AUAGAAAUGAAG |
| IVS22 − 941 | | | | TGTAAT | | UGUAAU |
| SCN1A- | 166864738 | 166864756 | 390 | TTTTTATAGAAAT | 750 | UUUUUAUAGAAA |
| IVS22 − 936 | | | | GAAGT | | UGAAGU |
| SCN1A- | 166864733 | 166864751 | 391 | CAGCTTTTTTATA | 751 | CAGCUUUUUUAU |
| IVS22 − 931 | | | | GAAAT | | AGAAAU |
| SCN1A- | 166864728 | 166864746 | 392 | AAGATCAGCTTT | 752 | AAGAUCAGCUUU |
| IVS22 − 926 | | | | TTTATA | | UUUAUA |
| SCN1A- | 166864723 | 166864741 | 393 | CCGATAAGATCA | 753 | CCGAUAAGAUCA |
| IVS22 − 921 | | | | GCTTTT | | GCUUUU |
| SCN1A- | 166864718 | 166864736 | 394 | GTATACCGATAA | 754 | GUAUACCGAUAA |
| IVS22 − 916 | | | | GATCAG | | GAUCAG |
| SCN1A- | 166864713 | 166864731 | 395 | TAAAAGTATACC | 755 | UAAAAGUAUACC |
| IVS22 − 911 | | | | GATAAG | | GAUAAG |
| SCN1A- | 166864708 | 166864726 | 396 | AAAATTAAAAGT | 756 | AAAAUUAAAAGU |
| IVS22 − 906 | | | | ATACCG | | AUACCG |
| SCN1A- | 166864703 | 166864721 | 397 | CTGAGAAAATTA | 757 | CUGAGAAAAUUA |
| IVS22 − 901 | | | | AAAGTA | | AAAGUA |
| SCN1A- | 166864698 | 166864716 | 398 | TATTTCTGAGAA | 758 | UAUUUCUGAGAA |
| IVS22 − 896 | | | | AATTAA | | AAUUAA |
| SCN1A- | 166864693 | 166864711 | 399 | ATGGTTATTTCTG | 759 | AUGGUUAUUUCU |
| IVS22 − 891 | | | | AGAAA | | GAGAAA |
| SCN1A- | 166864688 | 166864706 | 400 | TAGATATGGTTA | 760 | UAGAUAUGGUUA |
| IVS22 − 886 | | | | TTTCTG | | UUUCUG |
| SCN1A- | 166864683 | 166864701 | 401 | AATTATAGATAT | 761 | AAUUAUAGAUAU |
| IVS22 − 881 | | | | GGTTAT | | GGUUAU |
| SCN1A- | 166864678 | 166864696 | 402 | TTAATAATTATA | 762 | UUAAUAAUUAUA |
| IVS22 − 876 | | | | GATATG | | GAUAUG |
| SCN1A- | 166864673 | 166864691 | 403 | ATTGATTAATAA | 763 | AUUGAUUAAUAA |
| IVS22 − 871 | | | | TTATAG | | UUAUAG |
| SCN1A- | 166864668 | 166864686 | 404 | GCATTATTGATTA | 764 | GCAUUAUUGAUU |
| IVS22 − 866 | | | | ATAAT | | AAUAAU |
| SCN1A- | 166864663 | 166864681 | 405 | AAAAGGCATTAT | 765 | AAAAGGCAUUAU |
| IVS22 − 861 | | | | TGATTA | | UGAUUA |
| SCN1A- | 166864658 | 166864676 | 406 | AATATAAAAGGC | 766 | AAUAUAAAAGGC |
| IVS22 − 856 | | | | ATTATT | | AUUAUU |
| SCN1A- | 166864653 | 166864671 | 407 | CTTTTAATATAAA | 767 | CUUUUAAUAUAA |
| IVS22 − 851 | | | | AGGCA | | AAGGCA |
| SCN1A- | 166864648 | 166864666 | 408 | AACCTCTTTTAAT | 768 | AACCUCUUUUAA |
| IVS22 − 846 | | | | ATAAA | | UAUAAA |
| SCN1A- | 166864643 | 166864661 | 409 | AAACTAACCTCT | 769 | AAACUAACCUCU |
| IVS22 − 841 | | | | TTTAAT | | UUUAAU |
| SCN1A- | 166864638 | 166864656 | 410 | TTCAAAAACTAA | 770 | UUCAAAAACUAA |
| IVS22 − 836 | | | | CCTCTT | | CCUCUU |
| SCN1A- | 166864633 | 166864651 | 411 | CAAGTTTCAAAA | 771 | CAAGUUUCAAAA |
| IVS22 − 831 | | | | ACTAAC | | ACUAAC |
| SCN1A- | 166864628 | 166864646 | 412 | AACTCCAAGTTT | 772 | AACUCCAAGUUU |
| IVS22 − 826 | | | | CAAAAA | | CAAAAA |
| SCN1A- | 166864623 | 166864641 | 413 | TCTAAAACTCCA | 773 | UCUAAAACUCCA |
| IVS22 − 821 | | | | AGTTTC | | AGUUUC |
| SCN1A- | 166864618 | 166864636 | 414 | TTATGTCTAAAA | 774 | UUAUGUCUAAAA |
| IVS22 − 816 | | | | CTCCAA | | CUCCAA |
| SCN1A- | 166864613 | 166864631 | 415 | GGATTTTATGTCT | 775 | GGAUUUUAUGUC |
| IVS22 − 811 | | | | AAAAC | | UAAAAC |
| SCN1A- | 166864608 | 166864626 | 416 | TATAAGGATTTT | 776 | UAUAAGGAUUUU |
| IVS22 − 806 | | | | ATGTCT | | AUGUCU |
| SCN1A- | 166864603 | 166864621 | 417 | GCATTTATAAGG | 777 | GCAUUUAUAAGG |
| IVS22 − 801 | | | | ATTTTA | | AUUUUA |
| SCN1A- | 166864598 | 166864616 | 418 | TATCAGCATTTAT | 778 | UAUCAGCAUUUA |
| IVS22 − 796 | | | | AAGGA | | UAAGGA |
| SCN1A- | 166864593 | 166864611 | 419 | ATCACTATCAGC | 779 | AUCACUAUCAGC |
| IVS22 − 791 | | | | ATTTAT | | AUUUAU |
| SCN1A- | 166864588 | 166864606 | 420 | GTTATATCACTAT | 780 | GUUAUAUCACUA |
| IVS22 − 786 | | | | CAGCA | | UCAGCA |
| SCN1A- | 166864583 | 166864601 | 421 | TATTAGTTATATC | 781 | UAUUAGUUAUAU |
| IVS22 − 781 | | | | ACTAT | | CACUAU |
| SCN1A- | 166864578 | 166864596 | 422 | TAAACTATTAGTT | 782 | UAAACUAUUAGU |
| IVS22 − 776 | | | | ATATC | | UAUAUC |
| SCN1A- | 166864573 | 166864591 | 423 | CCATTTAAACTAT | 783 | CCAUUUAAACUA |
| IVS22 − 771 | | | | TAGTT | | UUAGUU |
| SCN1A- | 166864568 | 166864586 | 424 | TCTGACCATTTAA | 784 | UCUGACCAUUUA |
| IVS22 − 766 | | | | ACTAT | | AACUAU |
| SCN1A- | 166864563 | 166864581 | 425 | ATAAATCTGACC | 785 | AUAAAUCUGACC |
| IVS22 − 761 | | | | ATTTAA | | AUUUAA |
| SCN1A- | 166864558 | 166864576 | 426 | TATTCATAAATCT | 786 | UAUUCAUAAAUC |
| IVS22 − 756 | | | | GACCA | | UGACCA |
| SCN1A- | 166864553 | 166864571 | 427 | AGCCATATTCAT | 787 | AGCCAUAUUCAU |
| IVS22 − 751 | | | | AAATCT | | AAAUCU |
| SCN1A- | 166864548 | 166864566 | 428 | AATAGAGCCATA | 788 | AAUAGAGCCAUA |
| IVS22 − 746 | | | | TTCATA | | UUCAUA |
| SCN1A- | 166864543 | 166864561 | 429 | TGAGGAATAGAG | 789 | UGAGGAAUAGAG |
| IVS22 − 741 | | | | CCATAT | | CCAUAU |
| SCN1A- | 166864538 | 166864556 | 430 | CATTATGAGGAA | 790 | CAUUAUGAGGAA |
| IVS22 − 736 | | | | TAGAGC | | UAGAGC |
| SCN1A- | 166864533 | 166864551 | 431 | GTTGTCATTATGA | 791 | GUUGUCAUUAUG |
| IVS22 − 731 | | | | GGAAT | | AGGAAU |
| SCN1A- | 166864528 | 166864546 | 432 | TGTATGTTGTCAT | 792 | UGUAUGUUGUCA |
| IVS22 − 726 | | | | TATGA | | UUAUGA |
| SCN1A- | 166864523 | 166864541 | 433 | CTGTGTGTATGTT | 793 | CUGUGUGUAUGU |
| IVS22 − 721 | | | | GTCAT | | UGUCAU |
| SCN1A- | 166864518 | 166864536 | 434 | TAGTGCTGTGTGT | 794 | UAGUGCUGUGUG |
| IVS22 − 716 | | | | ATGTT | | UAUGUU |
| SCN1A- | 166864513 | 166864531 | 435 | CATTTTAGTGCTG | 795 | CAUUUUAGUGCU |
| IVS22 − 711 | | | | TGTGT | | GUGUGU |
| SCN1A- | 166864508 | 166864526 | 436 | TTAGTCATTTTAG | 796 | UUAGUCAUUUUA |
| IVS22 − 706 | | | | TGCTG | | GUGCUG |
| SCN1A- | 166864503 | 166864521 | 437 | AGAGATTAGTCA | 797 | AGAGAUUAGUCA |
| IVS22 − 701 | | | | TTTTAG | | UUUUAG |
| SCN1A- | 166864498 | 166864516 | 438 | ATTGAAGAGATT | 798 | AUUGAAGAGAUU |
| IVS22 − 696 | | | | AGTCAT | | AGUCAU |
| SCN1A- | 166864493 | 166864511 | 439 | CACGTATTGAAG | 799 | CACGUAUUGAAG |
| IVS22 − 691 | | | | AGATTA | | AGAUUA |
| SCN1A- | 166864488 | 166864506 | 440 | CCAAACACGTAT | 800 | CCAAACACGUAU |
| IVS22 − 686 | | | | TGAAGA | | UGAAGA |
| SCN1A- | 166864483 | 166864501 | 441 | CAATGCCAAACA | 801 | CAAUGCCAAACA |
| IVS22 − 681 | | | | CGTATT | | CGUAUU |
| SCN1A- | 166864478 | 166864496 | 442 | CTCTACAATGCC | 802 | CUCUACAAUGCC |
| IVS22 − 676 | | | | AAACAC | | AAACAC |
| SCN1A- | 166864473 | 166864491 | 443 | TTTGACTCTACAA | 803 | UUUGACUCUACA |
| IVS22 − 671 | | | | TGCCA | | AUGCCA |
| SCN1A- | 166864468 | 166864486 | 444 | GTTATTTTGACTC | 804 | GUUAUUUUGACU |
| IVS22 − 666 | | | | TACAA | | CUACAA |
| SCN1A- | 166864463 | 166864481 | 445 | ATAACGTTATTTT | 805 | AUAACGUUAUUU |
| IVS22 − 661 | | | | GACTC | | UGACUC |
| SCN1A- | 166864458 | 166864476 | 446 | CAATTATAACGT | 806 | CAAUUAUAACGU |
| IVS22 − 656 | | | | TATTTT | | UAUUUU |
| SCN1A- | 166864453 | 166864471 | 447 | AGAATCAATTAT | 807 | AGAAUCAAUUAU |
| IVS22 − 651 | | | | AACGTT | | AACGUU |
| SCN1A- | 166864448 | 166864466 | 448 | AAAATAGAATCA | 808 | AAAAUAGAAUCA |
| IVS22 − 646 | | | | ATTATA | | AUUAUA |
| SCN1A- | 166864443 | 166864461 | 449 | TATAAAAAATAG | 809 | UAUAAAAAAUAG |
| IVS22 − 641 | | | | AATCAA | | AAUCAA |
| SCN1A- | 166864438 | 166864456 | 450 | AGAAGTATAAAA | 810 | AGAAGUAUAAAA |
| IVS22 − 636 | | | | AATAGA | | AAUAGA |
| SCN1A- | 166864433 | 166864451 | 451 | ACACTAGAAGTA | 811 | ACACUAGAAGUA |
| IVS22 − 631 | | | | TAAAAA | | UAAAAA |
| SCN1A- | 166864428 | 166864446 | 452 | TCCAAACACTAG | 812 | UCCAAACACUAG |
| IVS22 − 626 | | | | AAGTAT | | AAGUAU |
| SCN1A- | 166864423 | 166864441 | 453 | AAATATCCAAAC | 813 | AAAUAUCCAAAC |
| IVS22 − 621 | | | | ACTAGA | | ACUAGA |
| SCN1A- | 166864418 | 166864436 | 454 | AAATAAAATATC | 814 | AAAUAAAAUAUC |
| IVS22 − 616 | | | | CAAACA | | CAAACA |
| SCN1A- | 166864413 | 166864431 | 455 | TTACAAAATAAA | 815 | UUACAAAAUAAA |
| IVS22 − 611 | | | | ATATCC | | AUAUCC |
| SCN1A- | 166864408 | 166864426 | 456 | TATTTTTACAAAA | 816 | UAUUUUUACAAA |
| IVS22 − 606 | | | | TAAAA | | AUAAAA |
| SCN1A- | 166864403 | 166864421 | 457 | GATTATATTTTTA | 817 | GAUUAUAUUUUU |
| IVS22 − 601 | | | | CAAAA | | ACAAAA |
| SCN1A- | 166864398 | 166864416 | 458 | TTCATGATTATAT | 818 | UUCAUGAUUAUA |
| IVS22 − 596 | | | | TTTTA | | UUUUUA |
| SCN1A- | 166864393 | 166864411 | 459 | CATCATTCATGAT | 819 | CAUCAUUCAUGA |
| IVS22 − 591 | | | | TATAT | | UUAUAU |
| SCN1A- | 166864388 | 166864406 | 460 | CTCACCATCATTC | 820 | CUCACCAUCAUU |
| IVS22 − 586 | | | | ATGAT | | CAUGAU |
| SCN1A- | 166864383 | 166864401 | 461 | CCAACCTCACCA | 821 | CCAACCUCACCA |
| IVS22 − 581 | | | | TCATTC | | UCAUUC |
| SCN1A- | 166864378 | 166864396 | 462 | TATATCCAACCTC | 822 | UAUAUCCAACCU |
| IVS22 − 576 | | | | ACCAT | | CACCAU |
| SCN1A- | 166864373 | 166864391 | 463 | ATTCTTATATCCA | 823 | AUUCUUAUAUCC |
| IVS22 − 571 | | | | ACCTC | | AACCUC |
| SCN1A- | 166864368 | 166864386 | 464 | TCATCATTCTTAT | 824 | UCAUCAUUCUUA |
| IVS22 − 566 | | | | ATCCA | | UAUCCA |
| SCN1A- | 166864363 | 166864381 | 465 | CATAATCATCATT | 825 | CAUAAUCAUCAU |
| IVS22 − 561 | | | | CTTAT | | UCUUAU |
| SCN1A- | 166864358 | 166864376 | 466 | CCAATCATAATC | 826 | CCAAUCAUAAUC |
| IVS22 − 556 | | | | ATCATT | | AUCAUU |
| SCN1A- | 166864353 | 166864371 | 467 | ACTTCCCAATCAT | 827 | ACUUCCCAAUCA |
| IVS22 − 551 | | | | AATCA | | UAAUCA |
| SCN1A- | 166864348 | 166864366 | 468 | ATCTCACTTCCCA | 828 | AUCUCACUUCCC |
| IVS22 − 546 | | | | ATCAT | | AAUCAU |
| SCN1A- | 166864343 | 166864361 | 469 | TTCAAATCTCACT | 829 | UUCAAAUCUCAC |
| IVS22 − 541 | | | | TCCCA | | UUCCCA |
| SCN1A- | 166864338 | 166864356 | 470 | GCATGTTCAAAT | 830 | GCAUGUUCAAAU |
| IVS22 − 536 | | | | CTCACT | | CUCACU |
| SCN1A- | 166864333 | 166864351 | 471 | TCTGAGCATGTTC | 831 | UCUGAGCAUGUU |
| IVS22 − 531 | | | | AAATC | | CAAAUC |
| SCN1A- | 166864328 | 166864346 | 472 | GAGTTTCTGAGC | 832 | GAGUUUCUGAGC |
| IVS22 − 526 | | | | ATGTTC | | AUGUUC |
| SCN1A- | 166864323 | 166864341 | 473 | AATGAGAGTTTC | 833 | AAUGAGAGUUUC |
| IVS22 − 521 | | | | TGAGCA | | UGAGCA |
| SCN1A- | 166864318 | 166864336 | 474 | AATTAAATGAGA | 834 | AAUUAAAUGAGA |
| IVS22 − 516 | | | | GTTTCT | | GUUUCU |
| SCN1A- | 166864313 | 166864331 | 475 | CAAAGAATTAAA | 835 | CAAAGAAUUAAA |
| IVS22 − 511 | | | | TGAGAG | | UGAGAG |
| SCN1A- | 166864308 | 166864326 | 476 | TAGGGCAAAGAA | 836 | UAGGGCAAAGAA |
| IVS22 − 506 | | | | TTAAAT | | UUAAAU |
| SCN1A- | 166864303 | 166864321 | 477 | GCTGCTAGGGCA | 837 | GCUGCUAGGGCA |
| IVS22 − 501 | | | | AAGAAT | | AAGAAU |
| SCN1A- | 166864298 | 166864316 | 478 | TTTATGCTGCTAG | 838 | UUUAUGCUGCUA |
| IVS22 − 496 | | | | GGCAA | | GGGCAA |
| SCN1A- | 166864293 | 166864311 | 479 | GTGATTTTATGCT | 839 | GUGAUUUUAUGC |
| IVS22 − 491 | | | | GCTAG | | UGCUAG |
| SCN1A- | 166864288 | 166864306 | 480 | CTATTGTGATTTT | 840 | CUAUUGUGAUUU |
| IVS22 − 486 | | | | ATGCT | | UAUGCU |
| SCN1A- | 166864283 | 166864301 | 481 | CGCAGCTATTGT | 841 | CGCAGCUAUUGU |
| IVS22 − 481 | | | | GATTTT | | GAUUUU |
| SCN1A- | 166864278 | 166864296 | 482 | TTTGACGCAGCT | 842 | UUUGACGCAGCU |
| IVS22 − 476 | | | | ATTGTG | | AUUGUG |
| SCN1A- | 166864273 | 166864291 | 483 | TACGCTTTGACG | 843 | UACGCUUUGACG |
| IVS22 − 471 | | | | CAGCTA | | CAGCUA |
| SCN1A- | 166864268 | 166864286 | 484 | TGAGTTACGCTTT | 844 | UGAGUUACGCUU |
| IVS22 − 466 | | | | GACGC | | UGACGC |
| SCN1A- | 166864263 | 166864281 | 485 | GTGCCTGAGTTA | 845 | GUGCCUGAGUUA |
| IVS22 − 461 | | | | CGCTTT | | CGCUUU |
| SCN1A- | 166864258 | 166864276 | 486 | AATGAGTGCCTG | 846 | AAUGAGUGCCUG |
| IVS22 − 456 | | | | AGTTAC | | AGUUAC |
| SCN1A- | 166864253 | 166864271 | 487 | AATAAAATGAGT | 847 | AAUAAAAUGAGU |
| IVS22 − 451 | | | | GCCTGA | | GCCUGA |
| SCN1A- | 166864248 | 166864266 | 488 | ACAAAAATAAAA | 848 | ACAAAAAUAAAA |
| IVS22 − 446 | | | | TGAGTG | | UGAGUG |
| SCN1A- | 166864243 | 166864261 | 489 | GAACAACAAAAA | 849 | GAACAACAAAAA |
| IVS22 − 441 | | | | TAAAAT | | UAAAAU |
| SCN1A- | 166864238 | 166864256 | 490 | TAACAGAACAAC | 850 | UAACAGAACAAC |
| IVS22 − 436 | | | | AAAAAT | | AAAAAU |
| SCN1A- | 166864233 | 166864251 | 491 | AAAAATAACAGA | 851 | AAAAAUAACAGA |
| IVS22 − 431 | | | | ACAACA | | ACAACA |
| SCN1A- | 166864228 | 166864246 | 492 | TTTGAAAAAATA | 852 | UUUGAAAAAAUA |
| IVS22 − 426 | | | | ACAGAA | | ACAGAA |
| SCN1A- | 166864223 | 166864241 | 493 | CATGCTTTGAAA | 853 | CAUGCUUUGAAA |
| IVS22 − 421 | | | | AAATAA | | AAAUAA |
| SCN1A- | 166864218 | 166864236 | 494 | AAGCACATGCTT | 854 | AAGCACAUGCUU |
| IVS22 − 416 | | | | TGAAAA | | UGAAAA |
| SCN1A- | 166864213 | 166864231 | 495 | CATAAAAGCACA | 855 | CAUAAAAGCACA |
| IVS22 − 411 | | | | TGCTTT | | UGCUUU |
| SCN1A- | 166864208 | 166864226 | 496 | TGTTGCATAAAA | 856 | UGUUGCAUAAAA |
| IVS22 − 406 | | | | GCACAT | | GCACAU |
| SCN1A- | 166864203 | 166864221 | 497 | AGTAATGTTGCA | 857 | AGUAAUGUUGCA |
| IVS22 − 401 | | | | TAAAAG | | UAAAAG |
| SCN1A- | 166864198 | 166864216 | 498 | TATTCAGTAATGT | 858 | UAUUCAGUAAUG |
| IVS22 − 396 | | | | TGCAT | | UUGCAU |
| SCN1A- | 166864193 | 166864211 | 499 | TGCTTTATTCAGT | 859 | UGCUUUAUUCAG |
| IVS22 − 391 | | | | AATGT | | UAAUGU |
| SCN1A- | 166864188 | 166864206 | 500 | CAACATGCTTTAT | 860 | CAACAUGCUUUA |
| IVS22 − 386 | | | | TCAGT | | UUCAGU |
| SCN1A- | 166864183 | 166864201 | 501 | CTGTACAACATG | 861 | CUGUACAACAUG |
| IVS22 − 381 | | | | CTTTAT | | CUUUAU |
| SCN1A- | 166864178 | 166864196 | 502 | AAGCACTGTACA | 862 | AAGCACUGUACA |
| IVS22 − 376 | | | | ACATGC | | ACAUGC |
| SCN1A- | 166864173 | 166864191 | 503 | TTATCAAGCACT | 863 | UUAUCAAGCACU |
| IVS22 − 371 | | | | GTACAA | | GUACAA |
| SCN1A- | 166864168 | 166864186 | 504 | ACTTCTTATCAAG | 864 | ACUUCUUAUCAA |
| IVS22 − 366 | | | | CACTG | | GCACUG |
| SCN1A- | 166864163 | 166864181 | 505 | TTCTAACTTCTTA | 865 | UUCUAACUUCUU |
| IVS22 − 361 | | | | TCAAG | | AUCAAG |
| SCN1A- | 166864158 | 166864176 | 506 | TTACTTTCTAACT | 866 | UUACUUUCUAAC |
| IVS22 − 356 | | | | TCTTA | | UUCUUA |
| SCN1A- | 166864153 | 166864171 | 507 | ATTTGTTACTTTC | 867 | AUUUGUUACUUU |
| IVS22 − 351 | | | | TAACT | | CUAACU |
| SCN1A- | 166864148 | 166864166 | 508 | AATTTATTTGTTA | 868 | AAUUUAUUUGUU |
| IVS22 − 346 | | | | CTTTC | | ACUUUC |
| SCN1A- | 166864143 | 166864161 | 509 | ATGATAATTTATT | 869 | AUGAUAAUUUAU |
| IVS22 − 341 | | | | TGTTA | | UUGUUA |
| SCN1A- | 166864138 | 166864156 | 510 | ACGTGATGATAA | 870 | ACGUGAUGAUAA |
| IVS22 − 336 | | | | TTTATT | | UUUAUU |
| SCN1A- | 166864133 | 166864151 | 511 | GTGCAACGTGAT | 871 | GUGCAACGUGAU |
| IVS22 − 331 | | | | GATAAT | | GAUAAU |
| SCN1A- | 166864128 | 166864146 | 512 | ACAAAGTGCAAC | 872 | ACAAAGUGCAAC |
| IVS22 − 326 | | | | GTGATG | | GUGAUG |
| SCN1A- | 166864123 | 166864141 | 513 | AAAACACAAAGT | 873 | AAAACACAAAGU |
| IVS22 − 321 | | | | GCAACG | | GCAACG |
| SCN1A- | 166864118 | 166864136 | 514 | CATGCAAAACAC | 874 | CAUGCAAAACAC |
| IVS22 − 316 | | | | AAAGTG | | AAAGUG |
| SCN1A- | 166864113 | 166864131 | 515 | TAAAACATGCAA | 875 | UAAAACAUGCAA |
| IVS22 − 311 | | | | AACACA | | AACACA |
| SCN1A- | 166864108 | 166864126 | 516 | GTGCATAAAACA | 876 | GUGCAUAAAACA |
| IVS22 − 306 | | | | TGCAAA | | UGCAAA |
| SCN1A- | 166864103 | 166864121 | 517 | GAAATGTGCATA | 877 | GAAAUGUGCAUA |
| IVS22 − 301 | | | | AAACAT | | AAACAU |
| SCN1A- | 166864098 | 166864116 | 518 | AGCCAGAAATGT | 878 | AGCCAGAAAUGU |
| IVS22 − 296 | | | | GCATAA | | GCAUAA |
| SCN1A- | 166864093 | 166864111 | 519 | CTGTCAGCCAGA | 879 | CUGUCAGCCAGA |
| IVS22 − 291 | | | | AATGTG | | AAUGUG |
| SCN1A- | 166864088 | 166864106 | 520 | AAAAGCTGTCAG | 880 | AAAAGCUGUCAG |
| IVS22 − 286 | | | | CCAGAA | | CCAGAA |
| SCN1A- | 166864083 | 166864101 | 521 | TGTTTAAAAGCT | 881 | UGUUUAAAAGCU |
| IVS22 − 281 | | | | GTCAGC | | GUCAGC |
| SCN1A- | 166864078 | 166864096 | 522 | ATAAATGTTTAA | 882 | AUAAAUGUUUAA |
| IVS22 − 276 | | | | AAGCTG | | AAGCUG |
| SCN1A- | 166864073 | 166864091 | 523 | ATACAATAAATG | 883 | AUACAAUAAAUG |
| IVS22 − 271 | | | | TTTAAA | | UUUAAA |
| SCN1A- | 166864068 | 166864086 | 524 | TTGAAATACAAT | 884 | UUGAAAUACAAU |
| IVS22 − 266 | | | | AAATGT | | AAAUGU |
| SCN1A- | 166864063 | 166864081 | 525 | GAAATTTGAAAT | 885 | GAAAUUUGAAAU |
| IVS22 − 261 | | | | ACAATA | | ACAAUA |
| SCN1A- | 166864058 | 166864076 | 526 | GACTGGAAATTT | 886 | GACUGGAAAUUU |
| IVS22 − 256 | | | | GAAATA | | GAAAUA |
| SCN1A- | 166864053 | 166864071 | 527 | ATTTGGACTGGA | 887 | AUUUGGACUGGA |
| IVS22 − 251 | | | | AATTTG | | AAUUUG |
| SCN1A- | 166864048 | 166864066 | 528 | GAAAAATTTGGA | 888 | GAAAAAUUUGGA |
| IVS22 − 246 | | | | CTGGAA | | CUGGAA |
| SCN1A- | 166864043 | 166864061 | 529 | AAGTTGAAAAAT | 889 | AAGUUGAAAAAU |
| IVS22 − 241 | | | | TTGGAC | | UUGGAC |
| SCN1A- | 166864038 | 166864056 | 530 | TTTACAAGTTGA | 890 | UUUACAAGUUGA |
| IVS22 − 236 | | | | AAAATT | | AAAAUU |
| SCN1A- | 166864033 | 166864051 | 531 | TTAATTTTACAAG | 891 | UUAAUUUUACAA |
| IVS22 − 231 | | | | TTGAA | | GUUGAA |
| SCN1A- | 166864028 | 166864046 | 532 | TCAGTTTAATTTT | 892 | UCAGUUUAAUUU |
| IVS22 − 226 | | | | ACAAG | | UACAAG |
| SCN1A- | 166864023 | 166864041 | 533 | TTCACTCAGTTTA | 893 | UUCACUCAGUUU |
| IVS22 − 221 | | | | ATTTT | | AAUUUU |
| SCN1A- | 166864018 | 166864036 | 534 | ATCAATTCACTC | 894 | AUCAAUUCACUC |
| IVS22 − 216 | | | | AGTTTA | | AGUUUA |
| SCN1A- | 166864013 | 166864031 | 535 | ACGACATCAATT | 895 | ACGACAUCAAUU |
| IVS22 − 211 | | | | CACTCA | | CACUCA |
| SCN1A- | 166864008 | 166864026 | 536 | TATTCACGACAT | 896 | UAUUCACGACAU |
| IVS22 − 206 | | | | CAATTC | | CAAUUC |
| SCN1A- | 166864003 | 166864021 | 537 | CTAGATATTCAC | 897 | CUAGAUAUUCAC |
| IVS22 − 201 | | | | GACATC | | GACAUC |
| SCN1A- | 166863998 | 166864016 | 538 | TTACCCTAGATAT | 898 | UUACCCUAGAUA |
| IVS22 − 196 | | | | TCACG | | UUCACG |
| SCN1A- | 166863993 | 166864011 | 539 | TTATTTTACCCTA | 899 | UUAUUUUACCCU |
| IVS22 − 191 | | | | GATAT | | AGAUAU |
| SCN1A- | 166863988 | 166864006 | 540 | AAATTTTATTTTA | 900 | AAAUUUUAUUUU |
| IVS22 − 186 | | | | CCCTA | | ACCCUA |
| SCN1A- | 166863983 | 166864001 | 541 | AACACAAATTTT | 901 | AACACAAAUUUU |
| IVS22 − 181 | | | | ATTTTA | | AUUUUA |
| SCN1A- | 166863978 | 166863996 | 542 | ATTTAAACACAA | 902 | AUUUAAACACAA |
| IVS22 − 176 | | | | ATTTTA | | AUUUUA |
| SCN1A- | 166863973 | 166863991 | 543 | TACAAATTTAAA | 903 | UACAAAUUUAAA |
| IVS22 − 171 | | | | CACAAA | | CACAAA |
| SCN1A- | 166863968 | 166863986 | 544 | AAAAATACAAAT | 904 | AAAAAUACAAAU |
| IVS22 − 166 | | | | TTAAAC | | UUAAAC |
| SCN1A- | 166863963 | 166863981 | 545 | AAATTAAAAATA | 905 | AAAUUAAAAAUA |
| IVS22 − 161 | | | | CAAATT | | CAAAUU |
| SCN1A- | 166863958 | 166863976 | 546 | TTAGGAAATTAA | 906 | UUAGGAAAUUAA |
| IVS22 − 156 | | | | AAATAC | | AAAUAC |
| SCN1A- | 166863953 | 166863971 | 547 | CTAGGTTAGGAA | 907 | CUAGGUUAGGAA |
| IVS22 − 151 | | | | ATTAAA | | AUUAAA |
| SCN1A- | 166863948 | 166863966 | 548 | ATTTCCTAGGTTA | 908 | AUUUCCUAGGUU |
| IVS22 − 146 | | | | GGAAA | | AGGAAA |
| SCN1A- | 166863943 | 166863961 | 549 | TTAAGATTTCCTA | 909 | UUAAGAUUUCCU |
| IVS22 − 141 | | | | GGTTA | | AGGUUA |
| SCN1A- | 166863938 | 166863956 | 550 | GGTATTTAAGAT | 910 | GGUAUUUAAGAU |
| IVS22 − 136 | | | | TTCCTA | | UUCCUA |
| SCN1A- | 166863933 | 166863951 | 551 | AAGAAGGTATTT | 911 | AAGAAGGUAUUU |
| IVS22 − 131 | | | | AAGATT | | AAGAUU |
| SCN1A- | 166863928 | 166863946 | 552 | TGAAAAAGAAGG | 912 | UGAAAAAGAAGG |
| IVS22 − 126 | | | | TATTTA | | UAUUUA |
| SCN1A- | 166863923 | 166863941 | 553 | TCTTTTGAAAAA | 913 | UCUUUUGAAAAA |
| IVS22 − 121 | | | | GAAGGT | | GAAGGU |
| SCN1A- | 166863918 | 166863936 | 554 | TGAGTTCTTTTGA | 914 | UGAGUUCUUUUG |
| IVS22 − 116 | | | | AAAAG | | AAAAAG |
| SCN1A- | 166863913 | 166863931 | 555 | AGACTTGAGTTC | 915 | AGACUUGAGUUC |
| IVS22 − 111 | | | | TTTTGA | | UUUUGA |
| SCN1A- | 166863908 | 166863926 | 556 | CATTAAGACTTG | 916 | CAUUAAGACUUG |
| IVS22 − 106 | | | | AGTTCT | | AGUUCU |
| SCN1A- | 166863903 | 166863921 | 557 | CTATCCATTAAG | 917 | CUAUCCAUUAAG |
| IVS22 − 101 | | | | ACTTGA | | ACUUGA |
| SCN1A- | 166863898 | 166863916 | 558 | TTTCCCTATCCAT | 918 | UUUCCCUAUCCA |
| IVS22 − 096 | | | | TAAGA | | UUAAGA |
| SCN1A- | 166863893 | 166863911 | 559 | GTCTGTTTCCCTA | 919 | GUCUGUUUCCCU |
| IVS22 − 091 | | | | TCCAT | | AUCCAU |
| SCN1A- | 166863631 | 166863649 | 560 | TTTCCCTACTGTG | 920 | UUUCCCUACUGU |
| IVS23 + 091 | | | | GTGCA | | GGUGCA |
| SCN1A- | 166863626 | 166863644 | 561 | TGTATTTTCCCTA | 921 | UGUAUUUUCCCU |
| IVS23 + 096 | | | | CTGTG | | ACUGUG |
| SCN1A- | 166863621 | 166863639 | 562 | AATAATGTATTTT | 922 | AAUAAUGUAUUU |
| IVS23 + 101 | | | | CCCTA | | UCCCUA |
| SCN1A- | 166863616 | 166863634 | 563 | ATGTAAATAATG | 923 | AUGUAAAUAAUG |
| IVS23 + 106 | | | | TATTTT | | UAUUUU |
| SCN1A- | 166863611 | 166863629 | 564 | TTAGGATGTAAA | 924 | UUAGGAUGUAAA |
| IVS23 + 111 | | | | TAATGT | | UAAUGU |
| SCN1A- | 166863606 | 166863624 | 565 | AGGGATTAGGAT | 925 | AGGGAUUAGGAU |
| IVS23 + 116 | | | | GTAAAT | | GUAAAU |
| SCN1A- | 166863601 | 166863619 | 566 | AAAGAGGGAATT | 926 | AAAGAGGGAAUU |
| IVS23 + 121 | | | | AGGATG | | AGGAUG |
| SCN1A- | 166863596 | 166863614 | 567 | ATTGAAAAGAAG | 927 | AUUGAAAAGAAG |
| IVS23 + 126 | | | | GGATTA | | GGAUUA |
| SCN1A- | 166863591 | 166863609 | 568 | AGACAATTGAAA | 928 | AGACAAUUGAAA |
| IVS23 + 131 | | | | AGAGGG | | AGAGGG |
| SCN1A- | 166863586 | 166863604 | 569 | ATTTAAGACAAT | 929 | AUUUAAGACAAU |
| IVS23 + 136 | | | | TGAAAA | | UGAAAA |
| SCN1A- | 166863581 | 166863599 | 570 | ATGAAATTTAAG | 930 | AUGAAAUUUAAG |
| IVS23 + 141 | | | | ACAATT | | ACAAUU |
| SCN1A- | 166863576 | 166863594 | 571 | TTCAAATGAAAT | 931 | UUCAAAUGAAAU |
| IVS23 + 146 | | | | TTAAGA | | UUAAGA |
| SCN1A- | 166863571 | 166863589 | 572 | TTTTTTTCAAATG | 932 | UUUUUUUCAAAU |
| IVS23 + 151 | | | | AAATT | | GAAAUU |
| SCN1A- | 166863566 | 166863584 | 573 | TTTTTTTTTTTTC | 933 | UUUUUUUUUUUU |
| IVS23 + 156 | | | | AAATG | | CAAAUG |
| SCN1A- | 166863561 | 166863579 | 574 | AAGGTTTTTTTTT | 934 | AAGGUUUUUUUU |
| IVS23 + 161 | | | | TTTTC | | UUUUUC |
| SCN1A- | 166863556 | 166863574 | 575 | TCATAAAGGTTTT | 935 | UCAUAAAGGUUU |
| IVS23 + 166 | | | | TTTTT | | UUUUUU |
| SCN1A- | 166863551 | 166863569 | 576 | TAAATTCATAAA | 936 | UAAAUUCAUAAA |
| IVS23 + 171 | | | | GGTTTT | | GGUUUU |
| SCN1A- | 166863546 | 166863564 | 577 | GAGGGTAAATTC | 937 | GAGGGUAAAUUC |
| IVS23 + 176 | | | | ATAAAG | | AUAAAG |
| SCN1A- | 166863541 | 166863559 | 578 | CCACAGAGGGTA | 938 | CCACAGAGGGUA |
| IVS23 + 181 | | | | AATTCA | | AAUUCA |
| SCN1A- | 166863536 | 166863554 | 579 | AAAATCCACAGA | 939 | AAAAUCCACAGA |
| IVS23 + 186 | | | | GGGTAA | | GGGUAA |
| SCN1A- | 166863531 | 166863549 | 580 | GGGTTAAAATCC | 940 | GGGUUAAAAUCC |
| IVS23 + 191 | | | | ACAGAG | | ACAGAG |
| SCN1A- | 166863526 | 166863544 | 581 | CATTGGGATTAA | 941 | CAUUGGGAUUAA |
| IVS23 + 196 | | | | AATCCA | | AAUCCA |
| SCN1A- | 166863521 | 166863539 | 582 | TCAACCATTAGG | 942 | UCAACCAUUAGG |
| IVS23 + 201 | | | | GTTAAA | | GUUAAA |
| SCN1A- | 166863516 | 166863534 | 583 | AGATATCAACCA | 943 | AGAUAUCAACCA |
| IVS23 + 206 | | | | TTGGGA | | UUGGGA |
| SCN1A- | 166863511 | 166863529 | 584 | AATAAAGATATC | 944 | AAUAAAGAUAUC |
| IVS23 + 211 | | | | AACCAT | | AACCAU |
| SCN1A- | 166863506 | 166863524 | 585 | AACTTAATAAAG | 945 | AACUUAAUAAAG |
| IVS23 + 216 | | | | ATATCA | | AUAUCA |
| SCN1A- | 166863501 | 166863519 | 586 | AATGAAACTTAA | 946 | AAUGAAACUUAA |
| IVS23 + 221 | | | | TAAAGA | | UAAAGA |
| SCN1A- | 166863496 | 166863514 | 587 | TATTCAATGAAA | 947 | UAUUCAAUGAAA |
| IVS23 + 226 | | | | CTTAAT | | CUUAAU |
| SCN1A- | 166863491 | 166863509 | 588 | AATCATATTCAA | 948 | AAUCAUAUUCAA |
| IVS23 + 231 | | | | TGAAAC | | UGAAAC |
| SCN1A- | 166863486 | 166863504 | 589 | AACTAAATCATA | 949 | AACUAAAUCAUA |
| IVS23 + 236 | | | | TTCAAT | | UUCAAU |
| SCN1A- | 166863481 | 166863499 | 590 | CACATAACTAAA | 950 | CACAUAACUAAA |
| IVS23 + 241 | | | | TCATAT | | UCAUAU |
| SCN1A- | 166863476 | 166863494 | 591 | ATATACACATAA | 951 | AUAUACACAUAA |
| IVS23 + 246 | | | | CTAAAT | | CUAAAU |
| SCN1A- | 166863471 | 166863489 | 592 | ACTCCATATACA | 952 | ACUCCAUAUACA |
| IVS23 + 251 | | | | CATAAC | | CAUAAC |
| SCN1A- | 166863466 | 166863484 | 593 | GGATAACTCCAT | 953 | GGAUAACUCCAU |
| IVS23 + 256 | | | | ATACAC | | AUACAC |
| SCN1A- | 166863461 | 166863479 | 594 | AAGATGGATAAC | 954 | AAGAUGGAUAAC |
| IVS23 + 261 | | | | TCCATA | | UCCAUA |
| SCN1A- | 166863456 | 166863474 | 595 | CCCCAAAGATGG | 955 | CCCCAAAGAUGG |
| IVS23 + 266 | | | | ATAACT | | AUAACU |
| SCN1A- | 166863451 | 166863469 | 596 | AATCTCCCCAAA | 956 | AAUCUCCCCAAA |
| IVS23 + 271 | | | | GATGGA | | GAUGGA |
| SCN1A- | 166863446 | 166863464 | 597 | CCAGTAATCTCC | 957 | CCAGUAAUCUCC |
| IVS23 + 276 | | | | CCAAAG | | CCAAAG |
| SCN1A- | 166863441 | 166863459 | 598 | CCAATCCAGTAA | 958 | CCAAUCCAGUAA |
| IVS23 + 281 | | | | TCTCCC | | UCUCCC |
| SCN1A- | 166863436 | 166863454 | 599 | CCTCACCAATCC | 959 | CCUCACCAAUCC |
| IVS23 + 286 | | | | AGTAAT | | AGUAAU |
| SCN1A- | 166863431 | 166863449 | 600 | CCCGCCCTCACC | 960 | CCCGCCCUCACCA |
| IVS23 + 291 | | | | AATCCA | | AUCCA |
| SCN1A- | 166863426 | 166863444 | 601 | GGTCCCCCGCCC | 961 | GGUCCCCCGCCC |
| IVS23 + 296 | | | | TCACCA | | UCACCA |
| SCN1A- | 166863421 | 166863439 | 602 | ACCAGGGTCCCC | 962 | ACCAGGGUCCCC |
| IVS23 + 301 | | | | CGCCCT | | CGCCCU |
| SCN1A- | 166863416 | 166863434 | 603 | TCTACACCAGGG | 963 | UCUACACCAGGG |
| IVS23 + 306 | | | | TCCCCC | | UCCCCC |
| SCN1A- | 166863411 | 166863429 | 604 | ATCATTCTACACC | 964 | AUCAUUCUACAC |
| IVS23 + 311 | | | | AGGGT | | CAGGGU |
| SCN1A- | 166863406 | 166863424 | 605 | ACATAATCATTCT | 965 | ACAUAAUCAUUC |
| IVS23 + 316 | | | | ACACC | | UACACC |
| SCN1A- | 166863401 | 166863419 | 606 | TTTTCACATAATC | 966 | UUUUCACAUAAU |
| IVS23 + 321 | | | | ATTCT | | CAUUCU |
| SCN1A- | 166863396 | 166863414 | 607 | TTGTTTTTTCACA | 967 | UUGUUUUUUCAC |
| IVS23 + 326 | | | | TAATC | | AUAAUC |
| SCN1A- | 166863391 | 166863409 | 608 | TTAAATTGTTTTT | 968 | UUAAAUUGUUUU |
| IVS23 + 331 | | | | TCACA | | UUCACA |
| SCN1A- | 166863386 | 166863404 | 609 | ACAAGTTAAATT | 969 | ACAAGUUAAAUU |
| IVS23 + 336 | | | | GTTTTT | | GUUUUU |
| SCN1A- | 166863381 | 166863399 | 610 | GCTTAACAAGTT | 970 | GCUUAACAAGUU |
| IVS23 + 341 | | | | AAATTG | | AAAUUG |
| SCN1A- | 166863376 | 166863394 | 611 | CATGAGCTTAAC | 971 | CAUGAGCUUAAC |
| IVS23 + 346 | | | | AAGTTA | | AAGUUA |
| SCN1A- | 166863371 | 166863389 | 612 | AGTATCATGAGC | 972 | AGUAUCAUGAGC |
| IVS23 + 351 | | | | TTAACA | | UUAACA |
| SCN1A- | 166863366 | 166863384 | 613 | CAAACAGTATCA | 973 | CAAACAGUAUCA |
| IVS23 + 356 | | | | TGAGCT | | UGAGCU |
| SCN1A- | 166863361 | 166863379 | 614 | TGCCTCAAACAG | 974 | UGCCUCAAACAG |
| IVS23 + 361 | | | | TATCAT | | UAUCAU |
| SCN1A- | 166863356 | 166863374 | 615 | CTGTATGCCTCA | 975 | CUGUAUGCCUCA |
| IVS23 + 366 | | | | AACAGT | | AACAGU |
| SCN1A- | 166863351 | 166863369 | 616 | AGGGACTGTATG | 976 | AGGGACUGUAUG |
| IVS23 + 371 | | | | CCTCAA | | CCUCAA |
| SCN1A- | 166863346 | 166863364 | 617 | ACAGCAGGGACT | 977 | ACAGCAGGGACU |
| IVS23 + 376 | | | | GTATGC | | GUAUGC |
| SCN1A- | 166863341 | 166863359 | 618 | ACTAAACAGCAA | 978 | ACUAAACAGCAA |
| IVS23 + 381 | | | | GGGCTG | | GGGCUG |
| SCN1A- | 166863336 | 166863354 | 619 | AATGTACTAAAC | 979 | AAUGUACUAAAC |
| IVS23 + 386 | | | | AGCAGG | | AGCAGG |
| SCN1A- | 166863331 | 166863349 | 620 | AGACCAATGTAC | 980 | AGACCAAUGUAC |
| IVS23 + 391 | | | | TAAACA | | UAAACA |
| SCN1A- | 166863326 | 166863344 | 621 | GACCCAGACCAA | 981 | GACCCAGACCAA |
| IVS23 + 396 | | | | TGTACT | | UGUACU |
| SCN1A- | 166863321 | 166863339 | 622 | TTCAGGACCCAG | 982 | UUCAGGACCCAG |
| IVS23 + 401 | | | | ACCAAT | | ACCAAU |
| SCN1A- | 166863316 | 166863334 | 623 | TAATTTTCAGGA | 983 | UAAUUUUCAGGA |
| IVS23 + 406 | | | | CCCAGA | | CCCAGA |
| SCN1A- | 166863311 | 166863329 | 624 | ACTGGTAATTTTC | 984 | ACUGGUAAUUUU |
| IVS23 + 411 | | | | AGGAC | | CAGGAC |
| SCN1A- | 166863306 | 166863324 | 625 | ATCTAACTGGTA | 985 | AUCUAACUGGUA |
| IVS23 + 416 | | | | ATTTTC | | AUUUUC |
| SCN1A- | 166863301 | 166863319 | 626 | ATGGTATCTAAC | 986 | AUGGUAUCUAAC |
| IVS23 + 421 | | | | TGGTAA | | UGGUAA |
| SCN1A- | 166863296 | 166863314 | 627 | AACTGATGGTAT | 987 | AACUGAUGGUAU |
| IVS23 + 426 | | | | CTAACT | | CUAACU |
| SCN1A- | 166863291 | 166863309 | 628 | TAATCAACTGAT | 988 | UAAUCAACUGAU |
| IVS23 + 431 | | | | GGTATC | | GGUAUC |
| SCN1A- | 166863286 | 166863304 | 629 | ATCAATAATCAA | 989 | AUCAAUAAUCAA |
| IVS23 + 436 | | | | CTGATG | | CUGAUG |
| SCN1A- | 166863281 | 166863299 | 630 | TACATATCAATA | 990 | UACAUAUCAAUA |
| IVS23 + 441 | | | | ATCAAC | | AUCAAC |
| SCN1A- | 166863276 | 166863294 | 631 | GCTCATACATAT | 991 | GCUCAUACAUAU |
| IVS23 + 446 | | | | CAATAA | | CAAUAA |
| SCN1A- | 166863271 | 166863289 | 632 | TATCTGCTCATAC | 992 | UAUCUGCUCAUA |
| IVS23 + 451 | | | | ATATC | | CAUAUC |
| SCN1A- | 166863266 | 166863284 | 633 | CCTAGTATCTGCT | 993 | CCUAGUAUCUGC |
| IVS23 + 456 | | | | CATAC | | UCAUAC |
| SCN1A- | 166863261 | 166863279 | 634 | TGCACCCTAGTA | 994 | UGCACCCUAGUA |
| IVS23 + 461 | | | | TCTGCT | | UCUGCU |
| SCN1A- | 166863256 | 166863274 | 635 | AATATTGCACCC | 995 | AAUAUUGCACCC |
| IVS23 + 466 | | | | TAGTAT | | UAGUAU |
| SCN1A- | 166863251 | 166863269 | 636 | CCTGAAATATTG | 996 | CCUGAAAUAUUG |
| IVS23 + 471 | | | | CACCCT | | CACCCU |
| SCN1A- | 166863246 | 166863264 | 637 | TGAAACCTGAAA | 997 | UGAAACCUGAAA |
| IVS23 + 476 | | | | TATTGC | | UAUUGC |
| SCN1A- | 166863241 | 166863259 | 638 | TCTTATGAAACCT | 998 | UCUUAUGAAACC |
| IVS23 + 481 | | | | GAAAT | | UGAAAU |
| SCN1A- | 166863236 | 166863254 | 639 | ACCAGTCTTATG | 999 | ACCAGUCUUAUG |
| IVS23 + 486 | | | | AAACCT | | AAACCU |
| SCN1A- | 166863231 | 166863249 | 640 | TCAATACCAGTC | 1000 | UCAAUACCAGUC |
| IVS23 + 491 | | | | TTATGA | | UUAUGA |
| SCN1A- | 166863226 | 166863244 | 641 | CACAATCAATAC | 1001 | CACAAUCAAUAC |
| IVS23 + 496 | | | | CAGTCT | | CAGUCU |
| SCN1A- | 166863221 | 166863239 | 642 | GTGGTCACAATC | 1002 | GUGGUCACAAUC |
| IVS23 + 501 | | | | AATACC | | AAUACC |
| SCN1A- | 166863216 | 166863234 | 643 | TGAGAGTGGTCA | 1003 | UGAGAGUGGUCA |
| IVS23 + 506 | | | | CAATCA | | CAAUCA |
| SCN1A- | 166863211 | 166863229 | 644 | AAAAATGAGAGT | 1004 | AAAAAUGAGAGU |
| IVS23 + 511 | | | | GGTCAC | | GGUCAC |
| SCN1A- | 166863206 | 166863224 | 645 | CAATAAAAAATG | 1005 | CAAUAAAAAAUG |
| IVS23 + 516 | | | | AGAGTG | | AGAGUG |
| SCN1A- | 166863201 | 166863219 | 646 | TTACACAATAAA | 1006 | UUACACAAUAAA |
| IVS23 + 521 | | | | AAATGA | | AAAUGA |
| SCN1A- | 166863196 | 166863214 | 647 | TGAACTTACACA | 1007 | UGAACUUACACA |
| IVS23 + 526 | | | | ATAAAA | | AUAAAA |
| SCN1A- | 166863191 | 166863209 | 648 | CCATATGAACTT | 1008 | CCAUAUGAACUU |
| IVS23 + 531 | | | | ACACAA | | ACACAA |
| SCN1A- | 166863186 | 166863204 | 649 | TAACCCCATATG | 1009 | UAACCCCAUAUG |
| IVS23 + 536 | | | | AACTTA | | AACUUA |
| SCN1A- | 166863181 | 166863199 | 650 | GAAAATAACCCC | 1010 | GAAAAUAACCCC |
| IVS23 + 541 | | | | ATATGA | | AUAUGA |
| SCN1A- | 166863176 | 166863194 | 651 | ATTTTGAAAATA | 1011 | AUUUUGAAAAUA |
| IVS23 + 546 | | | | ACCCCA | | ACCCCA |
| SCN1A- | 166863171 | 166863189 | 652 | TTAACATTTTGAA | 1012 | UUAACAUUUUGA |
| IVS23 + 551 | | | | AATAA | | AAAUAA |
| SCN1A- | 166863166 | 166863184 | 653 | CCTTGTTAACATT | 1013 | CCUUGUUAACAU |
| IVS23 + 556 | | | | TTGAA | | UUUGAA |
| SCN1A- | 166863161 | 166863179 | 654 | TTTTGCCTTGTTA | 1014 | UUUUGCCUUGUU |
| IVS23 + 561 | | | | ACATT | | AACAUU |
| SCN1A- | 166863156 | 166863174 | 655 | TATATTTTTGCCT | 1015 | UAUAUUUUUGCC |
| IVS23 + 566 | | | | TGTTA | | UUGUUA |
| SCN1A- | 166863151 | 166863169 | 656 | CTTAATATATTTT | 1016 | CUUAAUAUAUUU |
| IVS23 + 571 | | | | TGCCT | | UUGCCU |
| SCN1A- | 166863146 | 166863164 | 657 | TATTTCTTAATAT | 1017 | UAUUUCUUAAUA |
| IVS23 + 576 | | | | ATTTT | | UAUUUU |
| SCN1A- | 166863141 | 166863159 | 658 | TCAACTATTTCTT | 1018 | UCAACUAUUUCU |
| IVS23 + 581 | | | | AATAT | | UAAUAU |
| SCN1A- | 166863136 | 166863154 | 659 | CTTATTCAACTAT | 1019 | CUUAUUCAACUA |
| IVS23 + 586 | | | | TTCTT | | UUUCUU |
| SCN1A- | 166863131 | 166863149 | 660 | ATGTGCTTATTCA | 1020 | AUGUGCUUAUUC |
| IVS23 + 591 | | | | ACTAT | | AACUAU |
| SCN1A- | 166863126 | 166863144 | 661 | TTCACATGTGCTT | 1021 | UUCACAUGUGCU |
| IVS23 + 596 | | | | ATTCA | | UAUUCA |
| SCN1A- | 166863121 | 166863139 | 662 | CACAATTCACAT | 1022 | CACAAUUCACAU |
| IVS23 + 601 | | | | GTGCTT | | GUGCUU |
| SCN1A- | 166863116 | 166863134 | 663 | TACAACACAATT | 1023 | UACAACACAAUU |
| IVS23 + 606 | | | | CACATG | | CACAUG |
| SCN1A- | 166863111 | 166863129 | 664 | TTGTTTACAACAC | 1024 | UUGUUUACAACA |
| IVS23 + 611 | | | | AATTC | | CAAUUC |
| SCN1A- | 166863106 | 166863124 | 665 | ACTTTTTGTTTAC | 1025 | ACUUUUUGUUUA |
| IVS23 + 616 | | | | AACAC | | CAACAC |
| SCN1A- | 166863101 | 166863119 | 666 | TTCTAACTTTTTG | 1026 | UUCUAACUUUUU |
| IVS23 + 621 | | | | TTTAC | | GUUUAC |
| SCN1A- | 166863096 | 166863114 | 667 | TTTTATTCTAACT | 1027 | UUUUAUUCUAAC |
| IVS23 + 626 | | | | TTTTG | | UUUUUG |
| SCN1A- | 166863091 | 166863109 | 668 | GATTTTTTTATTC | 1028 | GAUUUUUUUAUU |
| IVS23 + 631 | | | | TAACT | | CUAACU |
| SCN1A- | 166863086 | 166863104 | 669 | AAGTGGATTTTTT | 1029 | AAGUGGAUUUUU |
| IVS23 + 636 | | | | TATTC | | UUAUUC |
| SCN1A- | 166863081 | 166863099 | 670 | CAAATAAGTGGA | 1030 | CAAAUAAGUGGA |
| IVS23 + 641 | | | | TTTTTT | | UUUUUU |
| SCN1A- | 166863076 | 166863094 | 671 | TAATTCAAATAA | 1031 | UAAUUCAAAUAA |
| IVS23 + 646 | | | | GTGGAT | | GUGGAU |
| SCN1A- | 166863071 | 166863089 | 672 | CTGCATAATTCA | 1032 | CUGCAUAAUUCA |
| IVS23 + 651 | | | | AATAAG | | AAUAAG |
| SCN1A- | 166863066 | 166863084 | 673 | CTATTCTGCATAA | 1033 | CUAUUCUGCAUA |
| IVS23 + 656 | | | | TTCAA | | AUUCAA |
| SCN1A- | 166863061 | 166863079 | 674 | GTATTCTATTCTG | 1034 | GUAUUCUAUUCU |
| IVS23 + 661 | | | | CATAA | | GCAUAA |
| SCN1A- | 166863056 | 166863074 | 675 | GGTATGTATTCTA | 1035 | GGUAUGUAUUCU |
| IVS23 + 666 | | | | TTCTG | | AUUCUG |
| SCN1A- | 166863051 | 166863069 | 676 | TTCTAGGTATGTA | 1036 | UUCUAGGUAUGU |
| IVS23 + 671 | | | | TTCTA | | AUUCUA |
| SCN1A- | 166863046 | 166863064 | 677 | TTTATTTCTAGGT | 1037 | UUUAUUUCUAGG |
| IVS23 + 676 | | | | ATGTA | | UAUGUA |
| SCN1A- | 166863041 | 166863059 | 678 | TTTGTTTTATTTC | 1038 | UUUGUUUUAUUU |
| IVS23 + 681 | | | | TAGGT | | CUAGGU |
| SCN1A- | 166863036 | 166863054 | 679 | ACGTTTTTGTTTT | 1039 | ACGUUUUUGUUU |
| IVS23 + 686 | | | | ATTTC | | UAUUUC |
| SCN1A- | 166863031 | 166863049 | 680 | ATAAGACGTTTTT | 1040 | AUAAGACGUUUU |
| IVS23 + 691 | | | | GTTTT | | UGUUUU |
| SCN1A- | 166863026 | 166863044 | 681 | TCATGATAAGAC | 1041 | UCAUGAUAAGAC |
| IVS23 + 696 | | | | GTTTTT | | GUUUUU |
| SCN1A- | 166863021 | 166863039 | 682 | AATACTCATGAT | 1042 | AAUACUCAUGAU |
| IVS23 + 701 | | | | AAGACG | | AAGACG |
| SCN1A- | 166863016 | 166863034 | 683 | ATCTTAATACTCA | 1043 | AUCUUAAUACUC |
| IVS23 + 706 | | | | TGATA | | AUGAUA |
| SCN1A- | 166863011 | 166863029 | 684 | ATTTTATCTTAAT | 1044 | AUUUUAUCUUAA |
| IVS23 + 711 | | | | ACTCA | | UACUCA |
| SCN1A- | 166863006 | 166863024 | 685 | CTTAAATTTTATC | 1045 | CUUAAAUUUUAU |
| IVS23 + 716 | | | | TTAAT | | CUUAAU |
| SCN1A- | 166863001 | 166863019 | 686 | TATGCCTTAAATT | 1046 | UAUGCCUUAAAU |
| IVS23 + 721 | | | | TTATC | | UUUAUC |
| SCN1A- | 166862996 | 166863014 | 687 | GAGTTTATGCCTT | 1047 | GAGUUUAUGCCU |
| IVS23 + 726 | | | | AAATT | | UAAAUU |
| SCN1A- | 166862991 | 166863009 | 688 | GAAGTGAGTTTA | 1048 | GAAGUGAGUUUA |
| IVS23 + 731 | | | | TGCCTT | | UGCCUU |
| SCN1A- | 166862986 | 166863004 | 689 | TCTAAGAAGTGA | 1049 | UCUAAGAAGUGA |
| IVS23 + 736 | | | | GTTTAT | | GUUUAU |
| SCN1A- | 166862981 | 166862999 | 690 | CTTATTCTAAGA | 1050 | CUUAUUCUAAGA |
| IVS23 + 741 | | | | AGTGAG | | AGUGAG |
| SCN1A- | 166862976 | 166862994 | 691 | AGTTACTTATTCT | 1051 | AGUUACUUAUUC |
| IVS23 + 746 | | | | AAGAA | | UAAGAA |
| SCN1A- | 166862971 | 166862989 | 692 | TTGGGAGTTACTT | 1052 | UUGGGAGUUACU |
| IVS23 + 751 | | | | ATTCT | | UAUUCU |
| SCN1A- | 166862966 | 166862984 | 693 | GTTAGTTGGGAG | 1053 | GUUAGUUGGGAG |
| IVS23 + 756 | | | | TTACTT | | UUACUU |
| SCN1A- | 166862961 | 166862979 | 694 | AGAAAGTTAGTT | 1054 | AGAAAGUUAGUU |
| IVS23 + 761 | | | | GGGAGT | | GGGAGU |
| SCN1A- | 166862956 | 166862974 | 695 | ATCCTAGAAAGT | 1055 | AUCCUAGAAAGU |
| IVS23 + 766 | | | | TAGTTG | | UAGUUG |
| SCN1A- | 166862951 | 166862969 | 696 | TTAAAATCCTAG | 1056 | UUAAAAUCCUAG |
| IVS23 + 771 | | | | AAAGTT | | AAAGUU |
| SCN1A- | 166862946 | 166862964 | 697 | ATGTTTTAAAATC | 1057 | AUGUUUUAAAAU |
| IVS23 + 776 | | | | CTAGA | | CCUAGA |
| SCN1A- | 166862941 | 166862959 | 698 | GTGTTATGTTTTA | 1058 | GUGUUAUGUUUU |
| IVS23 + 781 | | | | AAATC | | AAAAUC |
| SCN1A- | 166862936 | 166862954 | 699 | TCACTGTGTTATG | 1059 | UCACUGUGUUAU |
| IVS23 + 786 | | | | TTTTA | | GUUUUA |
| SCN1A- | 166862931 | 166862949 | 700 | TGTTTTCACTGTG | 1060 | UGUUUUCACUGU |
| IVS23 + 791 | | | | TTATG | | GUUAUG |
| SCN1A- | 166862926 | 166862944 | 701 | ATGTATGTTTTCA | 1061 | AUGUAUGUUUUC |
| IVS23 + 796 | | | | CTGTG | | ACUGUG |
| SCN1A- | 166862921 | 166862939 | 702 | TGTTTATGTATGT | 1062 | UGUUUAUGUAUG |
| IVS23 + 801 | | | | TTTCA | | UUUUCA |
| SCN1A- | 166862916 | 166862934 | 703 | AGTTATGTTTATG | 1063 | AGUUAUGUUUAU |
| IVS23 + 806 | | | | TATGT | | GUAUGU |
| SCN1A- | 166862911 | 166862929 | 704 | TGTAGAGTTATG | 1064 | UGUAGAGUUAUG |
| IVS23 + 811 | | | | TTTATG | | UUUAUG |
| SCN1A- | 166862906 | 166862924 | 705 | TAAAATGTAGAG | 1065 | UAAAAUGUAGAG |
| IVS23 + 816 | | | | TTATGT | | UUAUGU |
| SCN1A- | 166862901 | 166862919 | 706 | ATAAATAAAATG | 1066 | AUAAAUAAAAUG |
| IVS23 + 821 | | | | TAGAGT | | UAGAGU |
| SCN1A- | 166862896 | 166862914 | 707 | TAAGAATAAATA | 1067 | UAAGAAUAAAUA |
| IVS23 + 826 | | | | AAATGT | | AAAUGU |
| SCN1A- | 166862891 | 166862909 | 708 | AACTTTAAGAAT | 1068 | AACUUUAAGAAU |
| IVS23 + 831 | | | | AAATAA | | AAAUAA |
| SCN1A- | 166862886 | 166862904 | 709 | ACTTAAACTTTA | 1069 | ACUUAAACUUUA |
| IVS23 + 836 | | | | AGAATA | | AGAAUA |
| SCN1A- | 166862881 | 166862899 | 710 | AATACACTTAAA | 1070 | AAUACACUUAAA |
| IVS23 + 841 | | | | CTTTAA | | CUUUAA |
| SCN1A- | 166862876 | 166862894 | 711 | TGTATAATACAC | 1071 | UGUAUAAUACAC |
| IVS23 + 846 | | | | TTAAAC | | UUAAAC |
| SCN1A- | 166862871 | 166862889 | 712 | CTTCTTGTATAAT | 1072 | CUUCUUGUAUAA |
| IVS23 + 851 | | | | ACACT | | UACACU |
| SCN1A- | 166862866 | 166862884 | 713 | CTCTTCTTCTTGT | 1073 | CUCUUCUUCUUG |
| IVS23 + 856 | | | | ATAAT | | UAUAAU |
| SCN1A- | 166862861 | 166862879 | 714 | ATAAACTCTTCTT | 1074 | AUAAACUCUUCU |
| IVS23 + 861 | | | | CTTGT | | UCUUGU |
| SCN1A- | 166862856 | 166862874 | 715 | CGAATATAAACT | 1075 | CGAAUAUAAACU |
| IVS23 + 866 | | | | CTTCTT | | CUUCUU |
| SCN1A- | 166862851 | 166862869 | 716 | TCTCTCGAATATA | 1076 | UCUCUCGAAUAU |
| IVS23 + 871 | | | | AACTC | | AAACUC |
| SCN1A- | 166862846 | 166862864 | 717 | TTCTGTCTCTCGA | 1077 | UUCUGUCUCUCG |
| IVS23 + 876 | | | | ATATA | | AAUAUA |
| SCN1A- | 166862841 | 166862859 | 718 | ACTTTTTCTGTCT | 1078 | ACUUUUUCUGUC |
| IVS23 + 881 | | | | CTCGA | | UCUCGA |
| SCN1A- | 166862836 | 166862854 | 719 | TTCTGACTTTTTC | 1079 | UUCUGACUUUUU |
| IVS23 + 886 | | | | TGTCT | | CUGUCU |
| SCN1A- | 166862831 | 166862849 | 720 | AAAAATTCTGAC | 1080 | AAAAAUUCUGAC |
| IVS23 + 891 | | | | TTTTTC | | UUUUUC |
| SCN1A- | 166862826 | 166862844 | 721 | CAAACAAAAATT | 1081 | CAAACAAAAAUU |
| IVS23 + 896 | | | | CTGACT | | CUGACU |
| SCN1A- | 166862821 | 166862839 | 722 | TGATCCAAACAA | 1082 | UGAUCCAAACAA |
| IVS23 + 901 | | | | AAATTC | | AAAUUC |
| SCN1A- | 166862816 | 166862834 | 723 | ATTGGTGATCCA | 1083 | AUUGGUGAUCCA |
| IVS23 + 906 | | | | AACAAA | | AACAAA |
| SCN1A- | 166862811 | 166862829 | 724 | GATATATTGGTG | 1084 | GAUAUAUUGGUG |
| IVS23 + 911 | | | | ATCCAA | | AUCCAA |
| SCN1A- | 166862806 | 166862824 | 725 | GCTATGATATATT | 1085 | GCUAUGAUAUAU |
| IVS23 + 916 | | | | GGTGA | | UGGUGA |
| SCN1A- | 166862801 | 166862819 | 726 | TGTAAGCTATGA | 1086 | UGUAAGCUAUGA |
| IVS23 + 921 | | | | TATATT | | UAUAUU |
| SCN1A- | 166862796 | 166862814 | 727 | TTTTTTGTAAGCT | 1087 | UUUUUUGUAAGC |
| IVS23 + 926 | | | | ATGAT | | UAUGAU |
| SCN1A- | 166862791 | 166862809 | 728 | ACAGTTTTTTTGT | 1088 | ACAGUUUUUUUG |
| IVS23 + 931 | | | | AAGCT | | UAAGCU |
| SCN1A- | 166862786 | 166862804 | 729 | TTAAGACAGTTTT | 1089 | UUAAGACAGUUU |
| IVS23 + 936 | | | | TTTGT | | UUUUGU |
| SCN1A- | 166862781 | 166862799 | 730 | TTTAATTAAGAC | 1090 | UUUAAUUAAGAC |
| IVS23 + 941 | | | | AGTTTT | | AGUUUU |
| SCN1A- | 166862776 | 166862794 | 731 | TGGGTTTTAATTA | 1091 | UGGGUUUUAAUU |
| IVS23 + 946 | | | | AGACA | | AAGACA |
| SCN1A- | 166862771 | 166862789 | 732 | TGTTGTGGGTTTT | 1092 | UGUUGUGGGUUU |
| IVS23 + 951 | | | | AATTA | | UAAUUA |
| SCN1A- | 166862766 | 166862784 | 733 | AATTATGTTGTG | 1093 | AAUUAUGUUGUG |
| IVS23 + 956 | | | | GGTTTT | | GGUUUU |
| SCN1A- | 166862761 | 166862779 | 734 | AAAAAAATTATG | 1094 | AAAAAAAUUAUG |
| IVS23 + 961 | | | | TTGTGG | | UUGUGG |
| SCN1A- | 166862756 | 166862774 | 735 | AATCTAAAAAAA | 1095 | AAUCUAAAAAAA |
| IVS23 + 966 | | | | TTATGT | | UUAUGU |
| SCN1A- | 166862751 | 166862769 | 736 | TTAAAAATCTAA | 1096 | UUAAAAAUCUAA |
| IVS23 + 971 | | | | AAAAAT | | AAAAAU |
| SCN1A- | 166862746 | 166862764 | 737 | CTTTCTTAAAAAT | 1097 | CUUUCUUAAAAA |
| IVS23 + 976 | | | | CTAAA | | UCUAAA |
| SCN1A- | 166862741 | 166862759 | 738 | AGAATCTTTCTTA | 1098 | AGAAUCUUUCUU |
| IVS23 + 981 | | | | AAAAT | | AAAAAU |
| SCN1A- | 166862736 | 166862754 | 739 | ATAATAGAATCT | 1099 | AUAAUAGAAUCU |
| IVS23 + 986 | | | | TTCTTA | | UUCUUA |

TABLE 8a
Exemplary ASOs to correct intron retention

| SEQ | | | |
|---|---|---|---|
| ID | | | Retained |
| NO: | Name | Sequence (5′-3′) | Intron |
| 115 | SCN1A-IVS21 + 6 | CAGAGAAAAUAGUGUUCA | 21 |
| 116 | SCN1A-IVS21 + 11 | AUAUUCAGAGAAAAUAGU | 21 |
| 117 | SCN1A-IVS21 + 16 | UAAAAAUAUUCAGAGAAA | 21 |
| 118 | SCN1A-IVS21 + 21 | AACAAUAAAAAUAUUCAG | 21 |
| 119 | SCN1A-IVS21 + 26 | UUCCAAACAAUAAAAAUA | 21 |
| 120 | SCN1A-IVS21 + 31 | UAUUAUUCCAAACAAUAA | 21 |
| 121 | SCN1A-IVS21 + 36 | UUUGUUAUUAUUCCAAAC | 21 |
| 122 | SCN1A-IVS21 + 41 | AUUAUUUUGUUAUUAUUC | 21 |
| 123 | SCN1A-IVS21 + 46 | AUGUCAUUAUUUUGUUAU | 21 |
| 124 | SCN1A-IVS21 + 51 | GAUGUAUGUCAUUAUUUU | 21 |
| 125 | SCN1A-IVS21 + 56 | UAAUAGAUGUAUGUCAUU | 21 |
| 126 | SCN1A-IVS21 + 61 | CUAAAUAAUAGAUGUAUG | 21 |
| 127 | SCN1A-IVS21 + 66 | AGGAACUAAAUAAUAGAU | 21 |
| 128 | SCN1A-IVS21 + 71 | UUCUUAGGAACUAAAUAA | 21 |
| 129 | SCN1A-IVS21 + 76 | ACUUUUUCUUAGGAACUA | 21 |
| 130 | SCN1A-IVS21 + 81 | UAUAUACUUUUUCUUAGG | 21 |
| 131 | SCN1A-IVS21 − 16 | UGCAUGUUUUACUUUGGA | 21 |
| 132 | SCN1A-IVS21 − 21 | GUUUUACUUUGGAGUAAA | 21 |
| 133 | SCN1A-IVS21 − 26 | ACUUUGGAGUAAAAAUAA | 21 |
| 134 | SCN1A-IVS21 − 31 | GGAGUAAAAAUAAUUUAG | 21 |
| 135 | SCN1A-IVS21 − 36 | AAAAAUAAUUUAGACCUG | 21 |
| 136 | SCN1A-IVS21 − 41 | UAAUUUAGACCUGAUGUU | 21 |
| 137 | SCN1A-IVS21 − 46 | UAGACCUGAUGUUUAAUA | 21 |
| 138 | SCN1A-IVS21 − 51 | CUGAUGUUUAAUAAAUAU | 21 |
| 139 | SCN1A-IVS21 − 56 | GUUUAAUAAAUAUUCUUA | 21 |
| 140 | SCN1A-IVS21 − 61 | AUAAAUAUUCUUACUGAU | 21 |
| 141 | SCN1A-IVS21 − 66 | UAUUCUUACUGAUAUAAU | 21 |
| 142 | SCN1A-IVS21 − 71 | UUACUGAUAUAAUUUUCA | 21 |
| 143 | SCN1A-IVS21 − 76 | GAUAUAAUUUUCAAAAGG | 21 |
| 144 | SCN1A-IVS21 − 81 | AAUUUUCAAAAGGGAAUA | 21 |
| 145 | SCN1A-IVS21 − 27 | CUUUGGAGUAAAAAUAAU | 21 |
| 146 | SCN1A-IVS21 − 28 | UUUGGAGUAAAAAUAAUU | 21 |
| 148 | SCN1A-IVS21 − 29 | UUGGAGUAAAAAUAAUUU | 21 |
| 149 | SCN1A-IVS21 − 30 | UGGAGUAAAAAUAAUUUA | 21 |
| 150 | SCN1A-IVS21 − 32 | GAGUAAAAAUAAUUUAGA | 21 |
| 151 | SCN1A-IVS21 − 33 | AGUAAAAAUAAUUUAGAC | 21 |
| 152 | SCN1A-IVS21 − 34 | GUAAAAAUAAUUUAGACC | 21 |
| 153 | SCN1A-IVS21 − 35 | UAAAAAUAAUUUAGACCU | 21 |
| 154 | SCN1A-IVS21 − 72 | UACUGAUAUAAUUUUCAA | 21 |
| 155 | SCN1A-IVS21 − 73 | ACUGAUAUAAUUUUCAAA | 21 |
| 156 | SCN1A-IVS21 − 74 | CUGAUAUAAUUUUCAAAA | 21 |
| 157 | SCN1A-IVS21 − 75 | UGAUAUAAUUUUCAAAAG | 21 |
| 158 | SCN1A-IVS21 − 77 | AUAUAAUUUUCAAAAGGG | 21 |
| 159 | SCN1A-IVS21 − 78 | UAUAAUUUUCAAAAGGGA | 21 |
| 160 | SCN1A-IVS21 − 79 | AUAAUUUUCAAAAGGGAA | 21 |
| 161 | SCN1A-IVS21 − 80 | UAAUUUUCAAAAGGGAAU | 21 |
| 162 | | CAAGGAUUAAAGGUAGCA | 21 |

TABLE 8b
Exemplary ASOs to correct intron retention

| SEQ | | | |
|---|---|---|---|
| ID | | | Retained |
| NO: | Name | Sequence (5′-3′) | Intron |
| 163 | SCN1A-IVS21 + 6 | CAGAGAAAATAGTGTTCA | 21 |
| 164 | SCN1A-IVS21 + 11 | ATATTCAGAGAAAATAGT | 21 |
| 165 | SCN1A-IVS21 + 16 | TAAAAATATTCAGAGAAA | 21 |
| 166 | SCN1A-IVS21 + 21 | AACAATAAAAATATTCAG | 21 |
| 167 | SCN1A-IVS21 + 26 | TTCCAAACAATAAAAATA | 21 |
| 168 | SCN1A-IVS21 + 31 | TATTATTCCAAACAATAA | 21 |
| 169 | SCN1A-IVS21 + 36 | TTTGTTATTATTCCAAAC | 21 |
| 170 | SCN1A-IVS21 + 41 | ATTATTTTGTTATTATTC | 21 |
| 171 | SCN1A-IVS21 + 46 | ATGTCATTATTTTGTTAT | 21 |
| 172 | SCN1A-IVS21 + 51 | GATGTATGTCATTATTTT | 21 |
| 173 | SCN1A-IVS21 + 56 | TAATAGATGTATGTCATT | 21 |
| 174 | SCN1A-IVS21 + 61 | CTAAATAATAGATGTATG | 21 |
| 175 | SCN1A-IVS21 + 66 | AGGAACTAAATAATAGAT | 21 |
| 176 | SCN1A-IVS21 + 71 | TTCTTAGGAACTAAATAA | 21 |
| 177 | SCN1A-IVS21 + 76 | ACTTTTTCTTAGGAACTA | 21 |
| 178 | SCN1A-IVS21 + 81 | TATATACTTTTTCTTAGG | 21 |
| 179 | SCN1A-IVS21 − 16 | TGCATGTTTTACTTTGGA | 21 |
| 180 | SCN1A-IVS21 − 21 | GTTTTACTTTGGAGTAAA | 21 |
| 181 | SCN1A-IVS21 − 26 | ACTTTGGAGTAAAAATAA | 21 |
| 182 | SCN1A-IVS21 − 31 | GGAGTAAAAATAATTTAG | 21 |
| 183 | SCN1A-IVS21 − 36 | AAAAATAATTTAGACCTG | 21 |
| 184 | SCN1A-IVS21 − 41 | TAATTTAGACCTGATGTT | 21 |
| 185 | SCN1A-IVS21 − 46 | TAGACCTGATGTTTAATA | 21 |
| 186 | SCN1A-IVS21 − 51 | CTGATGTTTAATAAATAT | 21 |
| 187 | SCN1A-IVS21 − 56 | GTTTAATAAATATTCTTA | 21 |
| 188 | SCN1A-IVS21 − 61 | ATAAATATTCTTACTGAT | 21 |
| 189 | SCN1A-IVS21 − 66 | TATTCTTACTGATATAAT | 21 |
| 190 | SCN1A-IVS21 − 71 | TTACTGATATAATTTTCA | 21 |
| 191 | SCN1A-IVS21 − 76 | GATATAATTTTCAAAAGG | 21 |
| 192 | SCN1A-IVS21 − 81 | AATTTTCAAAAGGGAATA | 21 |
| 193 | SCN1A-IVS21 − 27 | CTTTGGAGTAAAAATAAT | 21 |
| 194 | SCN1A-IVS21 − 28 | TTTGGAGTAAAAATAATT | 21 |
| 195 | SCN1A-IVS21 − 29 | TTGGAGTAAAAATAATTT | 21 |
| 196 | SCN1A-IVS21 − 30 | TGGAGTAAAAATAATTTA | 21 |
| 197 | SCN1A-IVS21 − 32 | GAGTAAAAATAATTTAGA | 21 |
| 198 | SCN1A-IVS21 − 33 | AGTAAAAATAATTTAGAC | 21 |
| 199 | SCN1A-IVS21 − 34 | GTAAAAATAATTTAGACC | 21 |
| 200 | SCN1A-IVS21 − 35 | TAAAAATAATTTAGACCT | 21 |
| 201 | SCN1A-IVS21 − 72 | TACTGATATAATTTTCAA | 21 |
| 202 | SCN1A-IVS21 − 73 | ACTGATATAATTTTCAAA | 21 |
| 203 | SCN1A-IVS21 − 74 | CTGATATAATTTTCAAAA | 21 |
| 204 | SCN1A-IVS21 − 75 | TGATATAATTTTCAAAAG | 21 |
| 205 | SCN1A-IVS21 − 77 | ATATAATTTTCAAAAGGG | 21 |
| 206 | SCN1A-IVS21 − 78 | TATAATTTTCAAAAGGGA | 21 |
| 207 | SCN1A-IVS21 − 79 | ATAATTTTCAAAAGGGAA | 21 |
| 208 | SCN1A-IVS21 − 80 | TAATTTTCAAAAGGGAAT | 21 |
| 209 | | CAAGGATTAAAGGTAGCA | 21 |

### Example 15: Alternative Splicing of SCN1A Pre-mRNA that Results in NMD is Conserved in Multiple Species and in a DS Patient

[0659] Bioinformatic analysis of human brain samples revealed an exon inclusion event in the SCN1A gene that leads to a frameshift and the introduction of a premature termination codon. This example demonstrates validation of this non-productive splicing event in various species, including in a human DS patient.

[0660] FIG. 13A shows a schematic representation and validation of this non-productive splicing event by RT-PCR of human cells treated with or without the translation inhibitor, cycloheximide (CHX). The productive (canonical) isoform (bottom band) does not contain the alternative exon and translates into functional Na_{V}1.1 protein. The non-productive isoform contains the alternative exon (top band). DMSO: Dimethyl sulfoxide, CHX: Cycloheximide.

[0661] BLAST searches of the NCBI database identified highly conserved homologs of this SCN1A NMD-inducing exon in multiple species and the results were verified by RT-PCR (FIG. 13B). Moreover, the presence of the NMD-inducing exon inclusion event is retained in brain tissues from a DS patient (FIG. 13B), suggesting that the level of the NMD-exon inclusion event is unchanged between healthy and DS individuals. FIG. 13B shows TBE-PAGE of the RT-PCR products of SCN1A transcripts in cerebral cortex from a healthy female subject, a DS patient, a cynomolgus monkey, a DS mouse, a WT mouse (C57BL/6J) and a Sprague Dawley rat. Canonical SCN1A transcript is represented by the lower bands and product corresponding to the NMD-exon inclusion is represented by the upper bands. Patient variants located in the NMD-inducing exon region that was identified here have been shown to cause an increase in NMD-exon inclusion levels and a reduction of productive mRNA leading to DS. See Carvill et al., Am J Hum Genet 103, 1022-1029 (2018).

[0662] RT-PCR analysis was also performed to measure the inclusion level of the NMD-inducing exon and productive Scn1a mRNA in coronal brain sections from P0-P20 and 10-month old WT C57BL/6J mice (FIG. 13C). Densitometric measurement of the RT-PCR products showed that the NMD-inducing exon containing transcript (upper band) is largely unchanged during development while the productive mRNA (lower band) increases (FIG. 13D). Productive Scn1a transcript levels (FIG. 13D) begin to increase dramatically around P7-8. As shown in FIG. 13D, expression of Scn1a transcripts was first normalized to endogenous Gapdh and then to the Scn1a productive transcript at P0. Data are presented as mean±SD in the figure (n=2 or 3 samples from individual animals for each data point). Expression of Scn1a productive transcript was fit to a four-parameter non-linear curve. Expression of Scn1a non-productive transcript was best fit to a linear curve. These results suggested that it may be possible to increase total productive transcript levels by converting NMD-exon containing transcripts to productive transcripts and that the impact of this manipulation would be the greatest during early postnatal brain development.

### Example 16: ASO Administration Increases SCN1A Expression in Cultured Human Cells and Mouse Brain

[0663] A series of ASOs were designed, which bind to human SCN1A exon 20X and the surrounding intronic sequences. All ASOs used in the initial screening were based on 2′-methoxy-ethyl (MOE) modification of the oligonucleotide with a phosphorothioate backbone. ASOs were screened in human neural progenitor cells by free uptake, followed by analysis of SCN1A productive and exon 20X-containing nonproductive transcripts with RT-PCR and qPCR. As shown in FIG. 14A, a total of 47 ASOs were screened at 20 μM. A non-targeting ASO (NT) and no ASO control (−) were included. RPL32 was used as loading control. A number of ASOs were identified that significantly decreased the NMD-inducing exon inclusion and increased productive transcript expression (FIGS. 14A-14C). The most active ASO (ASO-22, indicated by the arrows in FIGS. 14A-14C) was selected for further evaluation. It was confirmed that the effect of ASO-22 is dose-dependent (FIG. 15). A non-targeting ASO control (NT) had no effect on the level of either transcript isoform (FIG. 15).

[0664] Dose-response relationships for ASO-22 were determined in human neural progenitor cells using free uptake or nucleofection delivery methods. The EC50 values were 3 μM, determined by free uptake, and 529 nM, determined by nucleofection (FIG. 14D). The specificity of ASO-22 was also assessed by measuring its effect on the expression of four highly homologous VGSC a subunit genes in treated cells. No change in the expression levels of SCN2A, SCN3A, SCN8A, or SCN9A were observed in ReNcells following 20, 8 or 3 μM ASO treatment via free uptake (FIG. 14E). These results indicate that ASO-22 potently and specifically increases productive Scn1a mRNA in human neural progenitor cells.

[0665] FIG. 14A shows ASO screen in ReNcells. TBE PAGE of RT-PCR products corresponding to SCN1A productive (lower bands, 549 bp) and non-productive mRNA containing exon 20X (upper bands, 613 bp) in ReNcells after gymnotic (free) uptake of ASO. FIG. 14B shows percentage of exon 20X inclusion in SCN1A transcript, as quantified from the RT-PCR products shown in FIG. 14A. PCR products were quantified by densitometry and plotted as percentage of the exon 20X-containing mRNA over total (exon 20X-containing and productive mRNA). n=1 for each ASO treatment group; n=2 for NT; n=11 for sham. FIG. 14C shows expression of SCN1A productive mRNA in ASO-treated ReNcells determined by SYBR green qPCR. Expression of SCN1A productive mRNA was first normalized to endogenous RPL32 and then to no ASO control (−). qPCR results were presented as mean±SD for each treatment. n=1 for each ASO treatment; n=2 for NT; n=10 for sham. FIG. 14D demonstrates the dose-response relationship of ASO-22 in ReNcells with free uptake and nucleofection. Expression of SCN1A was normalized to endogenous RPL32 and then to no ASO control. qPCR results were presented as mean±SD. (n=2 for both treatments). Expression of SCN1A productive transcript was fit to four-parameter non-linear curves. FIG. 14E demonstrates effect of selected ASOs on expression of homologous VGSC a subunit genes in ReNcells. Expression of SCN2A, 3A, 8A, and 9A in ReNcells was measured by probe-based qPCR, following gymnotic uptake of 20, 8 or 3 μM of ASO-22 or a non-target. ASO control (NT). SCN mRNA levels were first normalized to endogenous Gapdh and then to no ASO (−) treated cells. qPCR results were presented as mean±SD for each analysis (n=4 for each ASO treatment; n=8 for no ASO control.

[0666] FIGS. 15A-15C shows dose-dependent effects of ASO-22 on splicing and expression of Scn1a mRNA in ReNcells. ReNcells were treated with 20, 8 or 3 μM of ASO-22 for 72 h by gymnotic uptake, followed by DMSO or cycloheximide (CHX) treatment for 3 h before harvesting. A non-targeting ASO control (NT) and no ASO control (sham) were included. FIG. 15A shows TBE PAGE of RT-PCR products corresponding to SCN1A productive mRNA (lower bands, 549 bp) and non-productive mRNA containing exon 20X (upper bands, 613 bp) in ReNcells. RPL32 was used as the loading control. Expression of SCN1A transcript in ReNcells after gymnotic uptake of ASO-22 was quantified by probe-based qPCR. The levels of SCN1A productive (FIG. 15B) and non-productive (FIG. 15C) mRNA were measured separately with two qPCR assays (see description in the Methods). Transcript expression was first normalized to the endogenous RPL32 signal and then to the no ASO (sham) control. Sham qPCR results are presented as mean±SD for each group. (Independent repeats of experiment: n=1 for ASO-22 treatment; n=3 for sham; n=3 for sham+CHX).

[0667] To determine whether ASO-22 administration can upregulate productive mRNA and protein in a dose-dependent manner in vivo, P2 WT C57BL/6J mice were dosed with a single ICV injection of ASO-22 at 0.3, 1, 3, 5, 10, 20 or 30 μg and euthanized 5 days after treatment (FIG. 16A). Brain tissues were collected and analyzed for changes in levels of non-productive and productive Scn1a transcripts, respectively, as well as Na_{V}1.1 protein. Inclusion of the NMD exon in Scn1a transcript decreased with increasing ASO dose (FIG. 16B). A dose-dependent increase in productive Scn1a expression was also observed using probe-based qPCR (FIG. 16C) and RT-PCR (FIG. 17), with a ˜6-fold increase in expression level detected in the 10 μg dose group and no further increase was observed at 20 and 30 μg. Finally, expression levels of Na_{V}1.1 protein increased in a similar dose-dependent manner (FIG. 16D and FIG. 18). A non-targeting ASO control (NT) had no effect on the level of either Scn1a transcript or Na_{V}1.1. The expression of eight closely related VGSC a subunit genes plus Nax (Scn7a) were unaffected in the brains of mice that had received the ASO (FIG. 16E).

[0668] To determine the durability of the ASO-22 effect in brain, P2 WT mice ICV-injected with 10 μg of ASO-22 were examined for brain expression of Scn1a productive transcript levels at varying time points after injection (FIG. 16F). Increased levels of productive Scn1a transcript were observed for up to 30 days post injection (FIG. 16G and FIG. 19). Levels of Na_{V}1.1 protein also increased and were maintained during the 30-day observation period compared to PBS injection controls (FIG. 16H and FIG. 20).

[0669] FIG. 16A shows experimental design for ASO-22 dose-response relationship in vivo. FIG. 16B shows percentage of NMD-inducing exon inclusion in Scn1a transcript in mouse brains, as quantified by densitometry of TBE PAGE RT-PCR products (gels shown in FIG. 17). Quantification results are presented as mean±SD (n=3-14 for each treatment group). Plotted data in FIG. 16B were fit to a four-parameter non-linear curve. Similar to PBS treated animals, the percentage of NMD-inducing exon inclusion for NT ASO treatment group was 45.8%±0.7%. FIG. 16C shows fold changes in expression of Scn1a productive transcript in mouse brains, as quantified by probe-based qPCR. qPCR results are presented as mean±SD (n=3-14 for each treatment group). Plotted data were fit to a four-parameter non-linear curve. Similar to PBS treated animals, the fold change in Scn1a mRNA for the NT ASO treatment group was 0.9±0.1. FIG. 16D shows fold changes in expression of Na_{V}1.1 protein in mouse, as quantified by the Meso Scale Discovery (MSD) method. Quantification results are presented as mean±SD (n=3-8 for each treatment group). Plotted data were fit to a four-parameter non-linear curve. Similar to PBS treated animals, Na_{V}1.1 expression for the NT ASO treatment group was 16.8%±0.9% compared to adult brain. FIG. 16E shows effect of ASO-22 on expression of the 9 VGSC a subunit genes plus Nax (Scn7a) expressed in mouse brain. Expression of Scn1a productive transcript and the remaining 8 VGSC a subunit genes plus Nax (Scn7a) in mouse brains following ICV injection of PBS, a non-target ASO control (NT, 20 μg) or different doses of ASO-22 was measured by probe-based qPCR. Expression of each transcript was first normalized to endogenous Gapdh then compared to PBS injection controls. qPCR assays used here are listed in the Methods. Data are presented as mean±SD (n=3-14 for each treatment group). FIG. 16F shows experimental design for assessment of duration of effect in mouse brains following ICV injection of ASO-22. FIG. 16G shows quantification of Scn1a productive transcript in mouse brains at selected days post injection of 10 μg of ASO-22 at P2. Scn1a transcript was first normalized to endogenous Gapdh, then compared to mouse brains 1 day after receiving the PBS injection. qPCR results were presented as mean±SD (n=4-9 for each treatment group). Plotted data were fit to a four-parameter non-linear curve. FIG. 16H shows fold changes in expression of Na_{V}1.1 protein in mouse brains at selected days post injection of 10 μg of ASO-22 at P2. Na_{V}1.1 protein expression was quantified by the MSD method. MSD results were presented as mean±SD (n=4-5 randomly selected samples from each treatment group).

[0670] FIG. 17 shows dose-dependent effects of ASO-22 on expression of Scn1a in ICV-injected neonatal mouse brains. WT C57BL/6J mice were ICV injected with PBS, a non-target (NT, 20 μg) control, 0.3, 1, 3, 5, 10, 20 or 30 μg of ASO-22 at P2. Brains were harvested 5 days after injection and analyzed for Scn1a mRNA expression. TBE PAGE of RT-PCR products shows Scn1a productive (bottom bands, 498 bp, indicated by *) and NMD-inducing transcript (upper bands, 562 bp, indicated by §) in mouse brains. Quantification of the percentage of exon 21X inclusion is shown in FIG. 16B. Quantification of the Scn1a productive mRNA expression by qPCR is shown in FIG. 16C. M: DNA ladder, NEB, N3231L.

[0671] FIG. 18 shows dose-dependent effects of ASO-22 on expression of Na_{V}1.1 in ICV-injected neonatal mouse brains. WT C57BL/6J mice were ICV injected with 0.3, 1, 3 or 10 μg of ASO-22 or PBS at P2. Brains were harvested 5 days after injection and analyzed for Na_{V}1.1 expression. Na_{V}1.1 expression (˜223 kDa, indicated by *) was assessed by immunoblotting of two randomly selected brain samples from each dosing group. 50 μg of protein was loaded per lane. Ponceau S stained blots are included to show equal loading. Half input of protein from a brain injected with 10 μg of ASO was included for testing signal saturation of the immunoblotting. Brain samples from untreated Scn1a^{+/-} and WT littermate mice were included as controls. Quantification of Na_{V}1.1 expression by Meso Scale Discovery (MSD) method is shown in FIG. 16D.

[0672] FIG. 19 shows Expression of Scn1a mRNA in mouse brains at different post-injection days. WT C57BL/6J mice were ICV injected with 3 or 10 μg of ASO-22 or PBS at P2. Brains were harvested 1, 3, 5, 10, 20 or 30 days after injection and analyzed for Scn1a mRNA expression. TBE PAGE of RT-PCR products shows Scn1a productive (bottom bands, 498 bp, indicated by *) and NMD-inducing transcript (upper bands, 562 bp, indicated by §) in mouse brains. Gapdh was used as loading control. Quantification of the Scn1a productive mRNA expression by qPCR is shown in FIG. 16G. M: DNA ladder, NEB, N3231L.

[0673] FIG. 20 shows expression of Na_{V}1.1 in mouse brains at different post-injection days. WT C57BL/6J mice were ICV injected with 10 μg of ASO-22 or PBS at P2. Na_{V}1.1 expression (˜223 kDa, indicated by *) was assessed by immunoblotting of two randomly selected brain samples from the 10-, 20-, and 30-day post-injection mice. 50 μg of total protein was loaded per lane. Ponceau S stained blots are included to show equal loading. Quantification of changes in Na_{V}1.1 expression by Meso Scale Discovery (MSD) method is shown in FIG. 16H.

### Example 17: Treating Dravet Syndrome

[0674] Dravet syndrome (DS) is a rare infantile-onset drug-resistant developmental and epileptic encephalopathy with a poor long-term prognosis. Dravet syndrome affects an estimated 1:15,700 individuals in the United States, or a population of approximately 20,000 individuals (Wu et al., 2015, Pediatrics, 136:e1310-5, of which entire content is incorporated herein by reference). Dravet syndrome is most commonly caused by a pathogenic mutation in the SCN1A gene (Scheffer 2012, Eur. J. Paediatr. Neurol. 16, Suppl 1:S5-8, of which entire content is incorporated herein by reference). Single nucleotide substitutions, small insertions or deletions, and even whole gene deletions have been reported, with at least 1257 different mutations in the SCN1A gene having been described in DS patients to date (Djémié et al., 2016, Mol Genet Genomic Med. 4:457-64, of which entire content is incorporated herein by reference). The SCN1A gene codes for the sodium voltage-gated channel alpha subunit (Na_{V}1.1 protein). SCN1A (Na_{V}1.1 channel) mutations associated with DS are mostly truncating or missense that lead to loss-of-function of the Na_{V}1.1 protein in >95% of cases (Catterall et al., 2010, J. Physiol. 588:1849-59; Meng et al., 2015, Hum Mutat. 2015; 36:573-80, of which entire content is incorporated herein by reference). The mutations are heterozygous in DS patients and result in haploinsufficiency of the Na_{V}1.1 protein.

[0675] Several SCN1A mutations (Thr226Met, Val422Leu) have been identified in children with early infantile SCN1A encephalopathy, a profound developmental and epileptic encephalopathy that is phenotypically distinct from DS (Sadleir et al., 2017, Neurology, 89:1035-42, of which entire content is incorporated herein by reference). Upon functional biophysical testing using dynamic action potential clamp assessment, the mutations found to be causative for the early infantile disease have been demonstrated to cause gain-of-function changes in the Na_{V}1.1 protein (Berecki et al., 2019, Ann Neurol. 85:514-25, of which entire content is incorporated herein by reference). Several other mutations have been found using functional testing to cause gain-of-function changes in Na_{V}1.1 (V1611F, D1866Y, W1204R) that are also associated with a seizure phenotype that differs from DS (Meng et al., 2015, Hum Mutat. 2015; 36:573-80, of which entire content is incorporated herein by reference). In addition Familial Hemiplegic Migraine (FHM), a disease not typically associated with epilepsy, has been shown in some cases to be associated with gain-of-function mutation in SCN1A (L263V, T1174S, Q1489K, F1499L, L1624P, L1649Q, L1670W) (Dhifallah et al., 2018, Front Mol. Neurosci. 11:232; Fan et al., 2016, Cephalalgia. 36:1238-47; Cestele et al., 2013, Proc. Natl. Acad. Sci. USA. 2013; 110:17546-51, of which entire content is incorporated herein by reference). Other potential gain-of-function SCN1A mutations have been associated with non-DS symptoms such as Rasmussen Syndrome (Arg1575Cys) (Depienne et al., 2009, J. Med Genet. 46:183-91, of which entire content is incorporated herein by reference).

[0676] Loss of Na_{V}1.1 channels in inhibitory interneurons may cause epilepsy and premature death in patients with DS (Cheah et al., 2012, PNAS. 109:14646-51, of which entire content is incorporated herein by reference). The loss of Na_{V}1.1 channels in other nerve cells likely contributes to the seizures, as well as other aspects of DS (Liu et al., 2013, Ann Neurol. 74:128-39, of which entire content is incorporated herein by reference). Dravet syndrome is characterized by multiple seizure types and frequently progresses to status epilepticus or prolonged seizures lasting more than 5 minutes that require immediate intervention. Almost all patients (>90%) suffer from several comorbidities in addition to seizures including motor and speech impairment, severe intellectual and developmental disabilities, learning difficulties, autism, Attention-Deficit/Hyperactivity Disorder, sleep and gait abnormalities, and behavioral difficulties (Lagae et al., 2018, Dev. Med. Child Neurol. 60:63-72, of which entire content is incorporated herein by reference). As a result, DS patients have a remarkably low quality of life (Lagae et al., 2018, Dev. Med. Child Neurol. 60:63-72, incorporated herein by reference).

[0677] Neurologic examination and cognition are usually normal in children with DS up to 2 years of age (Ragona et al., 2011, Epilepsia. 52:386-92, of which entire content is incorporated herein by reference). However, among DS patients>4 years of age, nearly 100% have intellectual impairment (Genton et al., 2011, Epilepsia. 52, Suppl 2:44-9; Ragona et al., 2011, Epilepsia. 52:386-92, of which entire content is incorporated herein by reference). The degree of neurobehavioral impairment ranges from minor learning difficulty to intellectual disability. The time period between 1 year and 8 years of age (the Worsening Stage) is a critical interval for intervention (FIG. 3). After 8 years of age, nearly 100% of DS patients have evidence of substantial intellectual disability (Gataullina and Dulac, 2017, Seizure 44:58-64, of which entire content is incorporated herein by reference). Cognitive impairment in DS is not purely a consequence of seizures. Patients with few seizures may have very severe encephalopathy, and conversely, patients with frequent seizures may have relatively little cognitive decline. In addition, there does not appear to be a correlation between cognitive outcome and SCN1A mutation type, whether a missense or truncating mutation (Ragona et al., 2011, Epilepsia. 52:386-92, incorporated herein by reference). Longer use of contra-indicated medications (e.g., sodium channel blockers) in the first 5 years of disease can have negative effects on cognitive outcome in people with DS (de Lange et al., 2018, Epilepsia, 59:1154-65, of which entire content is incorporated herein by reference).

[0678] Dravet syndrome is among the most drug-resistant forms of epilepsy, with more than 90% of patients continuing to have uncontrolled seizures despite treatment with multiple antiepileptic drugs (AEDs), putting them at high risk for injury or death. The primary goal of therapy for DS is to reduce seizure frequency and severity; however, there remains a significant need for additional therapies for these patients that address the other comorbidities of DS. Dravet syndrome is associated with low quality of life (Lagae et al., 2018, Dev. Med. Child. Neurol. 60:63-72, incorporated herein by reference). Reducing seizure frequency and improving cognition and gait will likely have a dramatic improvement in quality of life.

### Therapeutic Agent

[0679] An exemplary therapeutic agent for treating Dravet syndrome is an antisense oligonucleotide or antisense oligomer (ASO) medicines that target ribonucleic acid (RNA) splicing to increase protein levels for the treatment of severe genetic diseases. Specifically, STK-001 is an embodiment of an ASO for the treatment of DS, which is caused by mutations in the SCN1A gene. Dravet syndrome is most often caused by mutations in one allele of the SCN1A gene. These patients possess one wild-type allele and one mutant allele. While the Na_{V}1.1 protein is produced from the wild-type allele, the mutant allele is translated into non-functional protein and results in 50% of the normal protein expression in the patient. STK-001 was designed to increase the level of productive SCN1A messenger RNA (mRNA) and consequently increase the expression of the sodium channel Na_{V}1.1 protein. That is, STK-001 binds to the SCN1A pre-mRNA and redirects the splicing machinery to decrease the amount of non-productive mRNA and increases productive mRNA, which is translated into increased Na_{V}1.1 protein from the wild-type allele. Restoring Na_{V}1.1 to physiological levels may reduce both the occurrence of seizures and other non-seizure comorbidities. This RNA-based approach may not be gene therapy, but rather RNA modulation, as it does not manipulate nor insert genetic deoxyribonucleic acid code.

[0680] STK-001 was developed to utilize TANGO (Targeted Augmentation of Nuclear Gene Output) technology to leverage a naturally occurring non-productive alternatively-spliced exon in human and mouse SCN1A that leads to the incorporation of a premature termination codon and subsequent transcript (mRNA) degradation. These non-productive splicing events are a part of normal gene regulation, and the non-productive splicing events are part of the wild-type or normal sequence of the SCN1A gene. Non-productive splicing events amenable to TANGO are alternative splicing that lead to nonsense-mediated mRNA decay exons, or NMD exons. NMD exons are found in over 10% of gene transcripts and, like retained introns, are part of the wild-type sequence of the gene. Non-productive mRNA, which includes these NMD exons, is degraded in the cytoplasm of the cell by nonsense-mediated mRNA decay and is not translated into protein. STK-001 binds to the pre-mRNA and redirects the splicing machinery to prevent inclusion of the NMD exon. This splice-switching decreases non-productive mRNA and increases productive mRNA, which is translated into increased full-length functional protein from the wild-type allele. The TANGO mechanism upregulates expression of the wild-type allele, meaning the TANGO mechanism does not rely on targeting a specific mutation. TANGO ASOs decrease the amount of non-productive mRNA and increase the level of productive mRNA, leading to the generation of more protein. TANGO operates in a mutation-independent manner, given it utilizes one wild-type allele, and does not alter protein coding splicing isoforms.

[0681] Scn1a mRNA and Na_{V}1.1 protein levels in rodent brains peak at 4 weeks after birth. In mice the rise in Na_{V}1.1 channels begins at 10 days postnatal and continues through 4 weeks of age (Cheah et al., 2013, Channels, 7:468-72, of which entire content is incorporated herein by reference). Human brain immunoblotting with subtype-specific antibodies showed that Na_{V}1.1 protein expression parallels that in rodent brain, with levels of Na_{V}1.1 being low at birth, steadily increasing to peak values by 20 months, and remaining steady through 30 months (Cheah et al., 2013, Channels, 7:468-72, incorporated herein by reference). A separate study in human brain showed Na_{V}1.1 immunoreactive neurons and neurites increased during the late fetal and postnatal periods, reached their peaks 7 to 9 months after birth (Wang et al., 2011, Brain Res. 1389:61-70, of which entire content is incorporated herein by reference). A similar pattern has been observed in non-human primates (NHPs) and humans. Although the absolute amount of NMD substrate is similar in brain tissues obtained from mice of different ages, because of the progressive increase in productive Scn1a mRNA and Na_{V}1.1 protein in the brain with age, the fold change in Scn1a and Na_{V}1.1 in STK-001-treated mice is higher in younger animals than in older animals. Therefore, STK-001 treatment may be more effective in restoring Na_{V}1.1 protein back to physiologically normal levels in pediatric DS patients. Preclinical testing in a neonatal mouse model of DS using STK-001 showed significant mortality benefit in animals 35 to 90 days postnatally (equivalent to a greater than 2-year-old human) (Arzimanoglou et al., 2018, Pediatr. Drugs. 20:249-64, of which entire content is incorporated herein by reference).

[0682] Oligonucleotide-based compounds are developed for the treatment of human brain disorders by direct delivery inside the blood-brain barrier. Oligonucleotides dosed directly in the CNS have several unique pharmacokinetic (PK) and pharmacodynamic (PD) properties, including active uptake mechanisms, low systemic exposure, long half-lives (t_{1/2}), accumulation, and gradual release from subcellular depots (Khorkova and Wahlestedt, 2017, Nat. Biotechnol. 35:249-63, of which entire content is incorporated herein by reference). CNS delivery of ASOs, such as STK-001, is not gene therapy (i.e., therapies delivered or expressed using viral technology). STK-001 is a synthetically manufactured chemical product which the FDA categorizes as a small molecule. STK-001 is chemically synthesized and may not be regarded as a biologic.

### Example 18: Pharmacological Evaluation of the Therapeutic Agent in Non-Human Models

[0683] Initial target engagement, pharmacology, and efficacy studies with STK-001 were performed in mice, including both wild-type and a DS mouse model. The targeted non-productive splicing event in SCN1A is highly conserved across multiple species, including mice, non-human primates (NHPs), and humans. The target sequence for STK-001 is also identical across species.

[0684] Characterization of target engagement and pharmacology of STK-001 was done in wild-type mice. Neonate (postnatal day one) mice were administered a single dose of STK-001 by intracerebroventricular injection. On Day 5 of life the brains were isolated and were processed for RNA and protein. Treatment with STK-001 resulted in a dose-dependent reduction of non-productive Scn1a mRNA. Furthermore, the reduction of non-productive mRNA was associated with an increase of productive Scn1a mRNA and an increase in Na_{V}1.1 protein.

[0685] STK-001 pharmacology and efficacy were also investigated in transgenic mice with a heterozygous deletion of Scn1a. This model was created by introducing a targeted deletion in the first coding exon of the Scn1a gene; these mice exhibit many aspects of the DS phenotype including seizures and premature lethality and has been previously used to evaluate new AEDs for DS. Neonate (postnatal day two) and wild-type littermate controls were administered a single dose of either placebo (consisting of a phosphate-buffered solution) or STK-001 by intracerebroventricular injection. A single injection of STK-001 restored Na_{V}1.1 protein in DS mice to levels that are near those of the wild-type mice at both 7 and 14 weeks. STK-001 treated samples showed an increase in expression of the SCN1A gene, but not any of the other SCN family members. These results demonstrate that STK-001 is highly specific for SCN1A among the highly homologous family of sodium channel genes, indicating a low likelihood of off-target activities. In addition to an increase in Na_{V}1.1 protein, the administration of a single dose of STK-001 in DS mice resulted in a significant reduction in premature mortality. Treatment with STK-001 resulted in 97% survival of DS mice for the 90-day postnatal observation period compared with 23% survival of placebo-treated mice. The 90-day post-natal mouse is equivalent to a greater than 2-year-old human (Arzimanoglou et al., 2018, Pediatr Drugs. 20:249-64, incorporated herein by reference).

[0686] In sum, preclinical data obtained with STK-001 demonstrate proof-of-mechanism and clinical efficacy for STK-001. STK-001 engages the target and elicits the predicted pharmacology in wild-type mice brain. Administration of a single dose of STK-001 in DS mice resulted in a significant reduction (p<0.0001) in premature mortality.

[0687] The pharmacology, distribution, and tolerability of STK-001 were also evaluated in cynomolgus monkeys. Pre-pubescent monkeys were administered a single dose of STK-001 or control solution by intrathecal (IT) injection at a dose range that coincides with the estimated therapeutic dose range and stays below the maximum tolerated dose based on tolerability in monkeys and published data for molecules of similar chemistry. The animals (n=3 for treatment groups and n=2 for control groups) were sacrificed at 2 days or 28 days after dosing. A two-fold increase in the Na_{V}1.1 protein was observed. The increase in Na_{V}1.1 was also correlated with the presence of STK-001 in brain tissue.

### Example 19: Pharmacological Evaluation of Therapeutic Agent in Human Patients

[0688] DS is a highly drug-resistant form of genetic epilepsy, associated with multiple severe comorbidities. The Worsening Stage (between 1 and 8 years of age) is a critical window for therapeutic intervention to reduce the occurrence and severity of comorbidities such as intellectual disability. It is therefore crucial to develop novel therapeutics for the treatment of DS that may be administered to the pediatric population.

[0689] The safety and PK endpoints are, for example, the safety profile and PK of single or multiple doses of STK-001. Safety variables for analysis include, but are not limited to, the incidence, type, and severity of AEs, vital signs, ECG/Holter, laboratory and physical examination parameters. The PK parameters may be obtained by non-compartmental analysis from plasma concentrations of STK-001 that may include, but are not limited to: Maximum plasma concentration (Cmax), Time to maximum plasma concentration (Tmax), Area under the plasma concentration-time curve from time 0 to infinity and to the last measurable concentration (AUC_{0-∞}, AUC₀₋ₜ), and Fold change in Cmax and AUC compared with dose levels. Exposure of STK-001 in CSF may be assessed by measuring concentrations of STK-001.

[0690] The efficacy endpoints are, for example, evidence of dose effect and comparison between baseline and the end of treatment in: (i) percentage change from baseline in convulsive seizure frequency (as measured by paper diary) calculated over 4-week time periods; (ii) proportion of patients with 50%, 75%, and 100% reduction (compared with baseline) in convulsive seizure frequency (as measured by paper diary) calculated over 4-week time periods; (iii) change from baseline in overall clinical status as measured by the following scales: Caregiver Global Impression of Change (CaGIC), Clinical Global Impression of Change (CGIC), and Change from baseline in the patient's quality of life as measured by the EuroQol-5D (Youth) (EQ-5D-Y) instrument.

[0691] Other efficacy endpoints include, but are not limited to, number and type of all convulsive and non-convulsive seizures, percentage change from baseline in total seizure frequency (as measured by paper diary) calculated over, e.g., 4-week time periods, proportion of patients with ≥50%, ≥75%, and 100% reduction (compared with baseline) in total seizure frequency (as measured by paper diary) calculated over, e.g., 4-week time periods, change in 10-20 electroencephalogram (EEG) parameters, total sleep time measured by actigraphy and as weekly sleep duration (hours) by sleep diary, convulsive seizure frequency as measured by, e.g., the Embrace2 wearable device, assessment of ambulation and gait as measured by the Gillette Functional Assessment Questionnaire (FAQ) 22-item skill set, and analysis of CSF, plasma, or serum samples for exploratory biomarkers (e.g., Na_{V}1.1, neurofilament light chain, etc).

### Dose Levels

[0692] Single or multiple doses of STK-001, e.g., 0.1, 0.5, 1, 2.5, 5, 6, 7, 8, 9, 10, 11, 12, 13, 14, 15, 16, 17, 18, 19, 20, 25, 30, 35, 40, 45, 50, 55, 60, 65, 70, 75, 80, 85, 90, 95, 100, 105, 110, 115, 120, 125, 130, 135, 140, 145, 150, 155, 160, 165, 170, 175, 180, 185, 190, 195, or 200 mg, is administered by intrathecal (IT) injection to patients with DS. The dose levels may be adjusted based on Safety Monitoring Committee (SMC) determination. Dose escalation between cohorts may be two-fold or lower increase for each dose level.

### Patient Population

[0693] Patients meeting the following criteria (Inclusion Criteria) may be eligible: (i) patient and/or authorized representative must be willing and able to give informed consent/assent and any authorizations required by local law for participation in the study; (ii) patient and their caregiver must be willing and able to comply with all protocol requirements; (iii) patient must be up to 18 years (inclusive) of age at Screening; (iv) patient must have DS as defined by: (a) onset prior to 12 months of age with recurrent focal motor or hemiconvulsive or generalized tonic-clonic seizures, which are often prolonged and triggered by hyperthermia, (b) no past history of causal magnetic resonance imaging (MRI) lesion (MRI not required to confirm absence of lesion), (c) no other known etiology, and (d) normal development at seizure onset; (v) patient must have a documented pathogenic, likely pathogenic variant, or variant of uncertain significance in the SCN1A gene associated with DS. Patients who have SCN1A testing results of negative (no variants of clinical significance identified) may not be enrolled; (vi) patient has had at least 2 prior treatments for epilepsy that either had lack of adequate seizure control (requiring an additional AED) or had to be discontinued due to an AE(s); (vii) patient must be experiencing 4 or more convulsive seizures (Hemiclonic, Focal With Motor Signs, Focal To Bilateral Tonic Clonic Convulsion, Generalized Tonic Clonic Convulsion, Tonic, Tonic/Atonic (Drop Attacks), and Clonic) during the initial Observation Period; (viii) patient must currently be taking at least one AED at a dose which has been stable for at least 4 weeks prior to Screening; (ix) all epilepsy medications or interventions for epilepsy (including ketogenic diet or vagal nerve stimulator) must have been stable (including product type, dose, and setting) for at least 4 weeks prior to Screening; (x) any marijuana- or cannabinoid-based product or medication is allowed but treatment must have been stable for at least 4 weeks prior to Screening, including supplier, ratio, and dose; and (xi) patient must meet age-appropriate institutional guidelines for IT drug administration procedures.

[0694] Patients meeting the following criteria (Exclusion Criteria) may not be eligible: (i) patient has one of the following mutations in the SCN1A gene: Thr226Met, Leu263Val, Val422Leu, Thr1174Ser, Trp1204Arg, Pro1345Ser, Gln1489Lys, Phe1499Leu, Arg1575Cys, Val1611Phe, Leu1624Pro, Arg1648Cys, Leu1649Gln, Leu1670Trp, Gly1674Arg, or Asp1866Tyr; (ii) patient has a known pathogenic mutation in another gene that causes epilepsy. (The pathogenic mutation must be homozygous in cases of known recessive disease); (iii) patient is currently being treated with a sodium channel blocker as maintenance treatment including: phenytoin, carbamazepine, oxcarbazepine, lamotrigine, lacosamide, or rufinamide; (iv) patient has clinically significant unstable medical conditions other than epilepsy; (v) patient has had clinically relevant symptoms or a clinically significant illness in the 4 weeks prior to Screening or prior to dosing on Day 1, other than epilepsy; (vi) patient has a history of brain or spinal cord disease (other than epilepsy or DS) or a history of bacterial meningitis or brain malformation; (vii) patient has a spinal deformity or other condition that may alter the free flow of CSF or has an implanted CSF drainage shunt; (viii) patient has clinically significant (in the judgment of the Investigator) abnormal laboratory values at Screening or prior to dosing on Day 1; (ix) patient has AST or ALT>2.5-fold ULN, serum creatinine>ULN, or platelet count<the lower limit of normal at Screening and upon repeat testing; (x) patient has clinically relevant abnormalities in the 12-lead ECG measured at Screening or prior to dosing on Day 1; (xi) patient has a psychiatric or behavioral disorder which, in the opinion of the Investigator, may interfere with the patient's participation in the study; (xii) patient is currently taking, or in the past 4 weeks has taken, any anticoagulant (except aspirin); (xiii) female patients of childbearing potential and male patients whose partner is of childbearing potential, unless willing to ensure that they or their partner use effective contraception, for example, abstinence, oral contraception, double barrier, or intra-uterine device during the study and for 3 months thereafter; (xiv) patient who is pregnant, lactating, or planning pregnancy during the course of the study and for 3 months thereafter following the last dose of STK-001; (xv) Patient who is currently enrolled in or has been part of a blinded clinical study involving an investigational product within 2 months prior to Screening; and (xvi) Patient has any other significant disease or disorder which, in the opinion of the Investigator, may either put the patient at risk because of participation in the study, may influence the results of the study, or may affect the patient's ability to participate in the study.

[0695] The mechanism of action of STK-001 may cause an increase in the levels of the gain-of-function mutated protein and treatment may lead to a worsening of symptoms. Patients carrying gain-of-function mutations in SCN1A may likely be excluded from the study because they do not meet the criteria for DS diagnosis.

### Administration of Therapeutic Agents

[0696] The drug product is a concentrate intended for dilution with artificial cerebral spinal fluid (aCSF) solution followed by intrathecal administration. The diluent, aCSF, for administration is supplied with the drug product. The drug product may be produced with sufficient fill volume to allow withdrawal of, e.g., 5.0 mL. The solution is a clear, colorless liquid that is essentially free of visible particles. Instructions regarding drug storage, preparation and dosing may be included.

[0697] Mode of Administration: diluted drug product may be administered as an IT slow bolus.

[0698] An exemplary drug product is provided in a kit comprised of 3 vials: 1 vial of drug product at an appropriate concentration; 1 vial of aCSF diluent; and 1 empty, sterile vial for mixing. It is suitably packaged in such a way as to protect the product from deterioration during transport and it is stored frozen at, e.g., −20° C. at the study site. Further information regarding storage and transport conditions may be provided. The study drug may be shipped on dry ice and stored on site at, e.g., −20° C.

[0699] In addition to the therapeutic agents as described herein, for example, STK-001, patients may take at least one AED during the study, and any AEDs the patient takes may be maintained at a stable dose prior to Screening and after dosing. For some examples, patients may take at least one AED during the study, and any AEDs the patient takes may be maintained at a stable dose for at least, e.g., 4 weeks prior to Screening and for the first, e.g., 12 weeks after dosing, in addition to the therapeutic agents as described herein, for example, STK-001. Exemplary medications or interventions for epilepsy include, but are not limited to, ketogenic diet, vagal nerve stimulator, cannabinoid or marijuana-derived products. Exemplary rescue medications allowed for home use include, but are not limited to, lorazepam, midazolam, and diazepam. Lorazepam may be used at 0.1-0.2 mg/kg as needed (PRN) intrabuccally, sublingually, or intravenously. Midazolam may be used at 0.1-0.2 mg/kg PRN intranasally, intrabuccally, or intravenously. Diazepam may be used at 0.2-0.5 mg/kg PRN rectally or intravenously.

[0700] The exemplary medications that may not be concomitantly used with the therapeutic agents as described herein, for example, STK-001, include, but are not limited to, sodium channel blockers as maintenance treatment (e.g., phenytoin, carbamazepine, oxcarbazepine, lamotrigine, lacosamide, or rufinamide), anticoagulants (except aspirin), and any investigational product or device.

### Study Assessments

[0701] Epilepsy Genetic Panel Testing: saliva samples are collected at Screening for determination of the patient's DS mutation and confirmation of eligibility. The samples are analyzed using a genetic epilepsy panel. The panel is also analyze genes associated with both syndromic and nonsyndromic causes of epilepsy (including SCN1A) and provides a comprehensive analysis for inherited epilepsy.

[0702] Baseline Assessments: exemplary patient demographic and baseline characteristic data to be collected on all patients include, but are not limited to, age at Screening, sex, race/ethnicity, age of DS disease onset, and diagnostic and treatment history for DS.

### Example 20: Targeted Augmentation of Nuclear Gene Output (TANGO) of SCN1A Reduces Seizures and Rescues Parvalbumin Positive Interneuron Firing Frequency in a Mouse Model of Dravet Syndrome

[0703] Dravet syndrome (DS) is a severe and progressive developmental and epileptic encephalopathy characterized by high seizure frequency and severity, intellectual disability, and a high risk of sudden unexpected death in epilepsy (SUDEP). Approximately 85% of DS cases are caused by spontaneous, heterozygous loss of function mutations in the SCN1A gene which encodes the voltage-gated sodium channel a subunit Na_{V}1.1. We developed a novel therapeutic approach to treat DS using antisense oligonucleotides (ASOs) to increase the endogenous expression of Scn1a mRNA and Na_{V}1.1 protein. We are testing this approach using the F2:129S-Scn1a+/−x C57BL/6J DS mouse model that has been shown previously to recapitulate many patient phenotypes.

### Methods

[0704] Targeted Augmentation of Nuclear Gene Output (TANGO), which modulates naturally occurring, non-productive splicing events to increase target protein expression, was used to screen and identify an ASO (STK-001) that can increase productive Scn1a mRNA and Na_{V}1.1 protein in vivo. We administered 20 μg TANGO ASO or PBS control to DS mice and wildtype (WT) littermates by single intracerebroventricular (ICV) injection at postnatal day (P)2. Mice were monitored by electroencephalography (EEG) pre (P13-19) and post (P20-40) weaning. DS mice were also crossed with WT mice hemizygous for a parvalbumin (PV)-tdTomato fluorescent reporter to produce DS mice expressing the tdTomato specifically in PV expressing interneurons. These mice received 20 μg ASO or PBS by ICV administration at P2 and then electrophysiological recordings were taken from tdTomato expressing cells in the somatosensory cortex between P17 and 23.

### Results

[0705] No seizures were detected in any of the mice prior to day 16. Between P16-19, ASO-injected DS mice continued seizure free (0/5 animals) whereas 50% (4/8 animals) of PBS-injected control DS mice had seizures. When assessed after weaning (P20-40), 2/11 P2 ASO injected DS mice developed seizures and one animal died while 9/11 P2 PBS-injected control DS mice developed seizures and seven animals died. The firing frequency of PV interneurons in DS mice assessed between P17 to P23 was significantly impaired. DS PV interneurons fired at a significantly (P<0.05) lower frequency than WT PV interneurons over a range of current injection steps. After ASO treatment at P2, the firing frequency of PV interneurons in DS mice was increased and was no longer significantly different from WT levels.

### Conclusions

[0706] These results provide evidence that increased Scn1a and Na_{V}1.1 expression achieved using a TANGO ASO can greatly decrease seizures and death rates in a mouse model of SCN1A-linked DS. Further, the current data support the hypothesis that the improvement in DS phenotype is in part due to restoration of excitability of PV expressing interneurons.

### Example 21: Targeted Augmentation of Nuclear Gene Output (TANGO) of SCN1A Reduces Seizures and Rescues Parvalbumin Positive Interneuron Firing Frequency in a Mouse Model of Dravet Syndrome

[0707] Dravet syndrome (DS) is a severe developmental and epileptic encephalopathy. DS is caused primarily by physiologically loss-of-function SCN1A mutations resulting in hypofunction of inhibitory interneurons. Patients suffer refractory seizures, cognitive and motor impairments, and have a substantial risk for SUDEP. There is a demand for therapeutic strategies that directly address genetic cause of disease.

[0708] STK-001 reduced seizure frequency and extended survival in DS mice with no significant deleterious effects observed in WT mice. Treatment with STK-001 rescues neuronal excitability of parvalbumin-positive inhibitory interneurons in DS mice, which supports the hypothesis that restoration of excitability to inhibitory interneurons is a viable approach toward rescuing DS mice from seizures and death

[0709] Potential future evaluations: collect electrophysiology recordings of voltage-gated sodium channel activity; explore effects on other inhibitory interneuron populations (SST, VIP, etc.); examine impact on network excitability (synaptic inhibition, etc.).

### Example 22: Safety and Pharmacokinetics of Antisense Oligonucleotide STK-001 in Children and Adolescents with Dravet Syndrome: Single Ascending Dose Design for the Open-Label Phase 1/2a MONARCH Study

### Rationale

[0710] Dravet syndrome (DS) is a severe and progressive developmental and epileptic encephalopathy that begins in the first year of life and is characterized by high seizure frequency and severity, intellectual disability, and a high risk of sudden unexpected death in epilepsy. Approximately 85% of DS cases are caused by spontaneous, heterozygous loss of function mutations in the SCN1A gene which encodes the voltage-gated sodium channel a subunit Na_{V}1.1. Upregulating Na_{V}1.1 protein expression may restore functioning neurons and prevent the occurrence of seizures and significant non-seizure comorbidities. STK-001 is an investigational antisense oligonucleotide treatment using a unique platform, Targeted Augmentation of Nuclear Gene Output (TANGO) that exploits naturally occurring nonproductive splicing events to increase Na_{V}1.1 protein expression. Current treatments focus on seizure control. STK-001 may be the first precision medicine approach for DS. This clinical study aims to primarily assess the safety, tolerability and pharmacokinetics of intrathecally administered STK-001. Secondary objectives aim to evaluate the effect of STK-001 on convulsive seizure frequency, overall clinical status and quality of life in Dravet syndrome patients.

### Methods

[0711] This phase 1/2a open-label single ascending dose study includes patients aged 2-18 years with disease onset prior to 12 months of age with recurrent seizures (focal motor, hemiconvulsive or generalized tonic-clonic) and genetically confirmed SCN1A variant. 2 cohorts based on age (2-12 and 13-18 years) will be administered a single dose of STK-001 intrathecally (IT). Each cohort will enroll up to 4 patients with an option to dose up to 3 additional patients per cohort at the same level based on clinical assessment. All patients will have a 28-day observation period evaluating seizure frequency. On Day 1, patients undergo cerebral spinal fluid (CSF) collection followed by a single IT administration of STK-001 and 24-hour post-dose assessment. There will be a 6-month follow-up period after dosing. Adverse events are monitored throughout the study. Plasma and CSF will be collected at multiple timepoints. Patients will also keep a seizure/sleep diary the full duration of the study.

### Results

[0712] This study will provide insight into the safety, tolerability, and pharmacokinetic profile of ascending doses of STK-001 in DS patients. In addition, the impact of STK-001 on frequency of convulsive seizures and quality of life may indicate the initial clinical effect of the individual doses.

### Conclusions

[0713] STK-001 has the potential to be the first disease-modifying therapy to address the genetic cause of DS by restoring physiological Na_{V}1.1 levels and reducing both occurrence of seizures and significant non-seizure comorbidities. The dose implications of this study may better inform future clinical trials on the appropriate and effective dosing for efficacy measures.

### Example 23: Safety and Pharmacokinetics of Antisense Oligonucleotide STK-001 in Children and Adolescents with Dravet Syndrome: Single Ascending Dose Design for the Open-Label Phase 1/2a Moncarch Study

### Background

[0714] Dravet syndrome (DS) is a severe and progressive genetic epilepsy characterized by frequent, prolonged, and refractory seizures, beginning within the first year of life. Available therapies do not adequately control seizures in 90% of DS patients, and they do not address other aspects of the disease, including intellectual disability, developmental de-lays, motor and speech impairment, behavioral problems, sleep abnormalities, and an increased risk of sudden unexpected death in epilepsy. Complications of the disease often contribute to a poor quality of life for patients and their caregivers. In approximately 85% of cases, DS is caused by spontaneous, heterozygous loss of function mutations in the SCN1A gene, which encodes the voltage-gated sodium channel type 1 a subunit (Na_{V}1.1). Upregulating Na_{V}1.1 may restore functioning neurons and pre-vent seizures and reduce non-seizure related comorbidities in DS.

### STK-001

[0715] STK-001 is an investigational proprietary antisense oligonucleotide (ASO) designed to upregulate Na_{V}1.1 protein expression by leveraging the non-mutant (wild-type) copy of SCN1A to restore physiological Na_{V}1.1 levels.

[0716] The proprietary TANGO platform aims to increase protein production from the healthy copy of a gene. In DS, patients have one functional gene copy (orange) and one mutated copy (red), resulting in half as much protein as needed to maintain health, These genes are transcribed into pre-messenger RNA (pre-mRNA); most pre-mRNA is productive, becoming a template for protein production, but some is non-productive pre-mRNA. Synthesized ASOs (green) bind to specific stretches of pre-mRNA, reducing the synthesis of non-productive mRNA and increasing the synthesis of productive mRNA. The increased levels of productive mRNA from the functional gene copy increase protein production, thereby restoring the target protein to near normal levels

[0717] STK-001 may be a first-in-class, disease-modifying (or precision medicine) for DS

### Methods: Study Design

[0718] Each dose cohort enrolls up to 4 patients, with an option to dose up to 6 additional patients per cohort for safety evaluation. Part A: Single ascending dose (SAD) at 3 dose levels: 10, 20, and 30 mg; Part B: Multiple ascending doses (MAD): 3 doses given every 4 weeks.

[0719] Dosing above 30 mg in this study remains on FDA partial clinical hold. Dose escalation is based on safety and tolerability assessment by the Safety Monitoring Committee (including external reviewers). Dosing begins in each cohort in 13- to 18-year-olds and an internal safety team will approve dosing in younger patients (2-12 years).

[0720] Study visits include the following (FIG. 26):screening visit; 4-week observation period: No change to current anti-epileptic therapy, ketogenic diet, or vagal nerve stimulator settings, Caregivers track child's seizure frequency during this period; Baseline visit: Blood and urine analyses, Quality of life, neurological, and general pediatric assessments; Inpatient treatment period: patients are admitted on the day of dosing and discharged after completing postdose assessments: all patients will receive intrathecal administration of STK-001; 6-month follow-up period.

[0721] Patients who complete the study will have the option to receive STK-001 in an open-label extension study if they meet enrollment criteria.

### Example 24: Safety and Pharmacokinetics of Antisense Oligonucleotide STK-001 in Children and Adolescents with Dravet Syndrome: Single and Multiple Ascending Dose Design for the Open-Label Phase 1/2a MONARCH Study

### Introduction

[0722] Dravet syndrome (DS) is a severe and progressive genetic epilepsy characterized by frequent, prolonged, and refractory seizures, beginning within the first year of life. Available therapies do not adequately control seizures in 90% of DS patients, and they do not address other aspects of the disease, including intellectual disability, developmental delays, motor and speech impairment, behavioral problems, sleep abnormalities, and an increased risk of sudden unexpected death in epilepsy. Complications of the disease often contribute to a poor quality of life for patients and their caregivers. In approximately 85% of cases, DS is caused by spontaneous, heterozygous loss of function mutations in the SCN1A gene, which encodes the voltage-gated sodium channel type 1 a subunit (Na_{V}1.1). Upregulating Na_{V}1.1 may restore functioning neurons and prevent seizures and reduce non-seizure related comorbidities in DS.

### STK-001

[0723] STK-001 is an investigational proprietary antisense oligonucleotide (ASO) designed to upregulate Na_{V}1.1 protein expression by leveraging the non-mutant (wild-type) copy of SCN1A to restore physiological Na_{V}1.1 levels.

[0724] The proprietary TANGO platform aims to increase protein production from the healthy copy of a gene (FIG. 24). In DS, patients have one functional gene copy (orange) and one mutated copy (red), resulting in half as much protein as needed to maintain health. These genes are transcribed into pre-messenger RNA (pre-mRNA); most pre-mRNA is productive, becoming a template for protein production, but some is non-productive pre-mRNA. Synthesized ASOs (green) bind to specific stretches of pre-mRNA, reducing the synthesis of non-productive mRNA and increasing the synthesis of productive mRNA. The increased levels of productive mRNA from the functional gene copy increase protein production, thereby restoring the target protein to near normal levels.

[0725] STK-001 may be a first-in-class, disease-modifying (or precision medicine) for DS.

### Study Design

[0726] Each dose cohort enrolls up to 4 patients, with an option to dose up to 6 additional patients per cohort for safety evaluation: Part A: Singe ascending dose (SAD) at 3 dose levels: 10, 20, and 30 mg; Part B: Multiple ascending doses (MAD): 3 doses given every 4 weeks.

[0727] Dosing above 30 mg in this study remains on FDA partial clinical hold. Dose escalation is based on safety and tolerability assessment by the Safety Monitoring Committee (including external reviewers). Dosing begins in each cohort in 13- to 18-year-olds and an internal safety team will approve dosing in younger patients (2-12 years).

[0728] Study visits include the following (FIG. 26): Screening visit; 4-week observation period: No change to current anti-epileptic therapy, ketogenic diet, or vagal nerve stimulator settings, Caregivers track child's seizure frequency during this period; Baseline visit: Blood and urine analyses, Quality of life, neurological, and general pediatric assessments; Inpatient treatment period: patients are admitted on the day of dosing and discharged after completing postdose assessments. All patients will receive intrathecal administration of STK-001; 6-month follow-up period.

[0729] Patients who complete the study will have the option to receive STK-001 in an open-label extension study if they meet enrollment criteria.

### Example 25: An Open-Label Study to Investigate the Safety of Single Ascending Doses in Children and Adolescents with Dravet Syndrome

[0730] Condition or disease: Dravet Syndrome.

[0731] Intervention/treatment: Drug: STK-001

[0732] Phase: Phase 1, Phase 2

### Detailed Description:

[0733] STK-001 is an investigational new medicine for the treatment of Dravet syndrome. STK-001 is an antisense oligonucleotide (ASO) that is intended to increase the level of productive SCN1A messenger RNA (mRNA) and consequently increase the expression of the sodium channel Na_{V}1.1 protein. This RNA-based approach is not gene therapy, but rather RNA modulation, as it does not manipulate nor insert genetic deoxyribonucleic acid (DNA).

[0734] STK-001 is designed to upregulate Na_{V}1.1 protein expression from the nonmutant (wild-type) copy of the SCN1A gene to restore physiological Na_{V}1.1 levels. Na_{V}1.1 levels are reduced in people with Dravet syndrome. Stoke has generated preclinical data demonstrating proof-of-mechanism for STK-001.

### Arms and Interventions:

[0735] Arm: Experimental: Cohort 1: STK-001 dose level 1 Enrollment of patients in two age groups. A Sentinel group of 2 patients aged 13 to 18 years of age, inclusive, and an expanded group of 2 patients 2 to 12 years of age. There will be an option to dose up to 3 additional patients at the same level.

[0736] Drug: STK-001-STK-001 drug product is an antisense oligonucleotide administered as an intrathecal injection. Single dose levels ranging from AA to BB mg will be administered.

[0737] Arm: Experimental: Cohort 2: STK-001 dose level 2 Enrollment of patients in two age groups. A Sentinel group of 2 patients aged 13 to 18 years of age, inclusive, and an expanded group of 2 patients 2 to 12 years of age. There will be an option to dose up to 3 additional patients at the same level.

[0738] Drug: STK-001-STK-001 drug product is an antisense oligonucleotide administered as an intrathecal injection. Single dose levels ranging from AA to BB mg will be administered.

### Outcome Measures:

[0739] Primary Outcome Measures:

[0740] 1. Incidence proportion of adverse events [Time Frame: Screening until 7 months after single drug dosing Safety of STK-001 will be evaluated by the proportion of subjects experiencing Adverse Events, Serious Adverse Events, and Adverse Events leading to drug discontinuation.

[0741] 2. Pharmacokinetic (PK) Parameters [Time Frame: Screening until 7 months after single drug dosing] Analysis of plasma concentrations of STK-001

[0742] 3. Exposure of STK-001 in Cerebrospinal Fluid (CSF) [Time Frame: Screening until 6 months after single drug dosing] Measurement of STK-001 concentrations

[0743] Secondary Outcome Measures:

[0744] 1. Measurement of seizure frequency [Time Frame: Screening until 7 months after single drug dosing] Measured by paper diary

[0745] 2. Change in clinical status [Time Frame: Screening until 7 months after single drug dosing] Change from baseline in overall clinical status as measured by the Caregiver Global Impression of Change (CaGIC)

[0746] Values of scales: a. Very much improved; b. Much improved; c. Minimally improved; d. No change; e. Minimally worse; f. Much worse; g. Very much worse

[0747] 3. Change in clinical status [Time Frame: Screening until 7 months after single drug dosing] Change from baseline in overall clinical status as measured by the Clinical Global Impression of Change (CGIC)

[0748] Values of scales: a. Very much improved; b. Much improved; c. Minimally improved; d. No change; e. Minimally worse; f. Much worse; g. Very much worse

[0749] 4. Measurement of Quality of Life [Time Frame: Screening until 7 months after single drug dosing] Change from baseline in the patient health is measured by the EuroQOL quality of life questionnaire, youth version (EQ-5D-Y) instrument. The scale is scored from 0-100. The reference to a high score indicates a better outcome of quality of life.

### Outcome Measures:

[0750] Primary Outcome Measures:

[0751] Ages Eligible for Study: 2 Years to 18 Years (Child, Adult)

[0752] Sexes Eligible for Study: All

[0753] Accepts Healthy Volunteers: No

[0754] Criteria

[0755] Inclusion Criteria: Must have DS with onset prior to 12 months of age with recurrent focal motor or hemiconvulsive or generalized tonic-clonic seizures, which are often prolonged and triggered by hyperthermia; No history of causal MRI lesion; No other known etiology; Normal development at seizure onset; Documented pathogenic, likely pathogenic variant, or variant of uncertain significance in the SCN1A gene associated with DS; Had at least 2 treatments for epilepsy that either had lack of adequate seizure control (requiring an additional AED) or had to be discontinued due to an AE(s); Currently be taking at least one AED at a dose which has been stable for at least 4 weeks prior to Screening; All epilepsy medications or interventions for epilepsy (including ketogenic diet or vagal nerve stimulator) must have been stable (including product type, dose, and setting) for at least 4 weeks prior to Screening.

[0756] Exclusion Criteria: Known pathogenic mutation in another gene that causes epilepsy; Currently being treated with an antiepileptic drug acting primarily as a sodium channel blocker including: phenytoin, carbamazepine, oxcarbazepine, lamotrigine, lacosamide, or rufinamide; Clinically significant unstable medical conditions other than epilepsy; Has had clinically relevant symptoms or a clinically significant illness in the 4 weeks prior to Screening or prior to dosing on Day 1, other than epilepsy; Any other significant disease or disorder which, in the opinion of the Investigator, may either put the patient at risk because of participation in the study, may influence the results of the study, or may affect the patient's ability to participate in the study.

[0757] While preferred embodiments of the present disclosure have been shown and described herein, it will be obvious to those skilled in the art that such embodiments are provided by way of example only. Numerous variations, changes, and substitutions will now occur to those skilled in the art without departing from the disclosure. It should be understood that various alternatives to the embodiments of the disclosure described herein may be employed in practicing the disclosure. It is intended that the following claims define the scope of the disclosure and that methods and structures within the scope of these claims and their equivalents be covered thereby.

### Specific Embodiments

[0758] Embodiment 1. A method of treating a disease or condition in a subject in need thereof by modulating expression of Na_{V}1.1 protein in a cell of the subject, comprising: administering from 0.5 milligrams to 500 milligrams of an antisense oligomer (ASO) to the subject, wherein the ASO modulates splicing of a non-sense mediated mRNA decay-inducing exon (NMD exon) from aa pre-mRNA in the cell that contains the NMD exon and that encodes the Na_{V}1.1 protein, thereby modulating the level of processed mRNA encoding the Na_{V}1.1 protein, and modulating expression of Na_{V}1.1 protein in the cell of the subject.

[0759] Embodiment 2. The method of embodiment 1, wherein the method comprises administering from 0.5 milligrams to 500 milligrams of the ASO to the subject.

[0760] Embodiment 3. The method of embodiment 1, wherein the method comprises administering from 1 milligram to 300 milligrams of the ASO to the subject.

[0761] Embodiment 4. The method of embodiment 1, wherein the method comprises administering from 2 milligrams to 300 milligrams of the ASO to the subject.

[0762] Embodiment 5. The method of embodiment 1, wherein the method comprises administering from 1 milligram to 200 milligrams of the ASO to the subject.

[0763] Embodiment 6. The method of embodiment 1, wherein the method comprises administering from 2 milligram to 200 milligrams of the ASO to the subject.

[0764] Embodiment 7. The method of embodiment 1, wherein the ASO:

[0765] (a) binds to a targeted portion of the pre-mRNA that contains the NMD exon and that encodes the Na_{V}1.1 protein;

[0766] (b) modulates binding of a factor involved in splicing of the pre-mRNA that contains the NMD exon and that encodes the Na_{V}1.1 protein; or

[0767] (c) a combination of (a) and (b).

[0768] Embodiment 8. The method of embodiment 7, wherein the ASO interferes with binding of the factor involved in splicing of the NMD exon from a region of the targeted portion.

[0769] Embodiment 9. The method of embodiment 1, wherein the ASO promotes exclusion of a non-sense mediated mRNA decay-inducing exon (NMD exon) from a pre-mRNA in the cell that contains the NMD exon and that encodes the Na_{V}1.1 protein.

[0770] Embodiment 10. The method of embodiment 7, wherein the targeted portion is proximal to the NMD exon.

[0771] Embodiment 11. The method of embodiment 10, wherein the targeted portion is at most about 1500 nucleotides, about 1000 nucleotides, about 800 nucleotides, about 700 nucleotides, about 600 nucleotides, about 500 nucleotides, about 400 nucleotides, about 300 nucleotides, about 200 nucleotides, about 100 nucleotides, about 80 nucleotides, about 70 nucleotides, about 60 nucleotides, about 50 nucleotides upstream of 5′ end of the NMD exon.

[0772] Embodiment 12. The method of embodiment 10, wherein the targeted portion is at least about 1500 nucleotides, about 1000 nucleotides, about 800 nucleotides, about 700 nucleotides, about 600 nucleotides, about 500 nucleotides, about 400 nucleotides, about 300 nucleotides, about 200 nucleotides, about 100 nucleotides, about 80 nucleotides, about 70 nucleotides, about 60 nucleotides, about 50 nucleotides, about 40 nucleotides, about 30 nucleotides, about 20 nucleotides, about 10 nucleotides, about 5 nucleotides, about 4 nucleotides, about 2 nucleotides, about 1 nucleotides upstream of 5′ end of the NMD exon.

[0773] Embodiment 13. The method of embodiment 10, wherein the targeted portion is at most about 1500 nucleotides, about 1000 nucleotides, about 800 nucleotides, about 700 nucleotides, about 600 nucleotides, about 500 nucleotides, about 400 nucleotides, about 300 nucleotides, about 200 nucleotides, about 100 nucleotides, about 80 nucleotides, about 70 nucleotides, about 60 nucleotides, about 50 nucleotides downstream of 3′ end of the NMD exon.

[0774] Embodiment 14. The method of embodiment 10, wherein the targeted portion is at least about 1500 nucleotides, about 1000 nucleotides, about 800 nucleotides, about 700 nucleotides, about 600 nucleotides, about 500 nucleotides, about 400 nucleotides, about 300 nucleotides, about 200 nucleotides, about 100 nucleotides, about 80 nucleotides, about 70 nucleotides, about 60 nucleotides, about 50 nucleotides, about 40 nucleotides, about 30 nucleotides, about 20 nucleotides, about 10 nucleotides, about 5 nucleotides, about 4 nucleotides, about 2 nucleotides, about 1 nucleotides downstream of 3′ end of the NMD exon.

[0775] Embodiment 15. The method of embodiment 7, wherein the targeted portion is located in an intronic region between two canonical exonic regions of the pre-mRNA that contains the NMD exon and that encodes the Na_{V}1.1 protein, and wherein the intronic region contains the NMD exon.

[0776] Embodiment 16. The method of embodiment 7, wherein the targeted portion at least partially overlaps with the NMD exon.

[0777] Embodiment 17. The method of embodiment 7, wherein the targeted portion at least partially overlaps with an intron upstream of the NMD exon.

[0778] Embodiment 18. The method of embodiment 7, wherein the targeted portion comprises 5′ NMD exon-intron junction or 3′ NMD exon-intron junction.

[0779] Embodiment 19. The method of embodiment 7, wherein the targeted portion is within the NMD exon.

[0780] Embodiment 20. The method of embodiment 7, wherein the targeted portion comprises about 5, 6, 7, 8, 9, 10, 11, 12, 13, 14, 15, 16, 17, 18, 19, 20, 21, 22, 23, 24, 25, 26, 27, 28, 29, 30, or more consecutive nucleotides of the NMD exon.

[0781] Embodiment 21. The method of embodiment 1, wherein the pre-mRNA that contains the NMD exon and that encodes the Na_{V}1.1 protein comprises a sequence with at least about 80%, 85%, 90%, 95%, 97%, or 100% sequence identity to any one of SEQ ID NOs: 2 or 7-10.

[0782] Embodiment 22. The method of embodiment 1, wherein the pre-mRNA that contains the NMD exon and that encodes the Na_{V}1.1 protein is encoded by a genetic sequence with at least about 80%, 85%, 90%, 95%, 97%, or 100% sequence identity to SEQ ID NOs: 1 or 3-6.

[0783] Embodiment 23. The method of embodiment 10, wherein the targeted portion is at most about 1500 nucleotides, about 1000 nucleotides, about 800 nucleotides, about 700 nucleotides, about 600 nucleotides, about 500 nucleotides, about 400 nucleotides, about 300 nucleotides, about 200 nucleotides, about 100 nucleotides, about 80 nucleotides, about 70 nucleotides, about 60 nucleotides, about 50 nucleotides upstream of genomic site GRCh37/hg19: chr2:166,863,803.

[0784] Embodiment 24. The method of embodiment 10, wherein the targeted portion is about 1000 nucleotides, about 800 nucleotides, about 700 nucleotides, about 600 nucleotides, about 500 nucleotides, about 400 nucleotides, about 300 nucleotides, about 200 nucleotides, about 100 nucleotides, about 80 nucleotides, about 70 nucleotides, about 60 nucleotides, about 50 nucleotides, about 40 nucleotides, about 30 nucleotides, about 20 nucleotides, about 10 nucleotides, about 5 nucleotides, about 4 nucleotides, about 2 nucleotides, about 1 nucleotides upstream of genomic site GRCh37/hg19: chr2:166,863,803.

[0785] Embodiment 25. The method of embodiment 10, wherein the targeted portion is at most about 1500 nucleotides, about 1000 nucleotides, about 800 nucleotides, about 700 nucleotides, about 600 nucleotides, about 500 nucleotides, about 400 nucleotides, about 300 nucleotides, about 200 nucleotides, about 100 nucleotides, about 80 nucleotides, about 70 nucleotides, about 60 nucleotides, about 50 nucleotides downstream of genomic site GRCh37/hg19: chr2:166,863,740.

[0786] Embodiment 26. The method of embodiment 10, wherein the targeted portion is about 1000 nucleotides, about 800 nucleotides, about 700 nucleotides, about 600 nucleotides, about 500 nucleotides, about 400 nucleotides, about 300 nucleotides, about 200 nucleotides, about 100 nucleotides, about 80 nucleotides, about 70 nucleotides, about 60 nucleotides, about 50 nucleotides, about 40 nucleotides, about 30 nucleotides, about 20 nucleotides, about 10 nucleotides, about 5 nucleotides, about 4 nucleotides, about 2 nucleotides, about 1 nucleotides downstream of genomic site GRCh37/hg19: chr2:166,863,740.

[0787] Embodiment 27. The method of embodiment 7, wherein the targeted portion of the pre-mRNA that contains the NMD exon and that encodes the Na_{V}1.1 protein comprises a sequence with at least 80%, 85%, 90%, 95%, 97%, or 100% sequence identity to a region comprising at least 8 contiguous nucleic acids of SEQ ID NO: SEQ ID NOs: 2 or 7-10.

[0788] Embodiment 28. The method of embodiment 1, wherein the ASO comprises a sequence that is at least about 80%, 85%, 90%, 95%, 97%, or 100% identity to any one of SEQ ID NOs: 21-67, 210-256, 304-379, or 380-1099.

[0789] Embodiment 29. The method of embodiment 7, wherein the targeted portion of the pre-mRNA that contains the NMD exon and that encodes the Na_{V}1.1 protein is within the non-sense mediated RNA decay-inducing exon 20x of SCN1A.

[0790] Embodiment 30. The method of embodiment 29, wherein the ASO comprises a sequence that is at least about 80%, 85%, 90%, 95%, 97%, or 100% identity to any one of SEQ ID NOs: 42-50, or 231-239.

[0791] Embodiment 31. The method of embodiment 7, wherein the targeted portion of the pre-mRNA that contains the NMD exon and that encodes the Na_{V}1.1 protein is upstream or downstream of the non-sense mediated RNA decay-inducing exon 20x of SCN1A.

[0792] Embodiment 32. The method of embodiment 31, wherein the ASO comprises a sequence that is at least about 80%, 85%, 90%, 95%, 97%, or 100% identity to any one of SEQ ID NOs: 21-38, 53-67, 210-227, 242-256, or 380-1099.

[0793] Embodiment 33. The method of embodiment 7, wherein the targeted portion of the pre-mRNA that contains the NMD exon and that encodes the Na_{V}1.1 protein comprises an exon-intron junction of exon 20x of SCN1A.

[0794] Embodiment 34. The method of embodiment 33, wherein the ASO comprises a sequence that is at least about 80%, 85%, 90%, 95%, 97%, or 100% identity to any one of SEQ ID NOs: 39-41, 51, 52, 228-230, 240, or 241.

[0795] Embodiment 35. The method of embodiment 1, wherein the ASO promotes exclusion of the NMD exon from the pre-mRNA that contains the NMD exon and that encodes Na_{V}1.1 protein.

[0796] Embodiment 36. The method of embodiment 35, wherein exclusion of the NMD exon from the pre-mRNA that contains the NMD exon and that encodes Na_{V}1.1 protein in the cell is increased about 1.1 to about 10-fold, about 1.5 to about 10-fold, about 2 to about 10-fold, about 3 to about 10-fold, about 4 to about 10-fold, about 1.1 to about 5-fold, about 1.1 to about 6-fold, about 1.1 to about 7-fold, about 1.1 to about 8-fold, about 1.1 to about 9-fold, about 2 to about 5-fold, about 2 to about 6-fold, about 2 to about 7-fold, about 2 to about 8-fold, about 2 to about 9-fold, about 3 to about 6-fold, about 3 to about 7-fold, about 3 to about 8-fold, about 3 to about 9-fold, about 4 to about 7-fold, about 4 to about 8-fold, about 4 to about 9-fold, at least about 1.1-fold, at least about 1.5-fold, at least about 2-fold, at least about 2.5-fold, at least about 3-fold, at least about 3.5-fold, at least about 4-fold, at least about 5-fold, or at least about 10-fold, compared to exclusion of the NMD exon from the processed mRNA encoding Na_{V}1.1 protein in a control cell.

[0797] Embodiment 37. The method of embodiment 35, wherein the ASO increases level of a processed mRNA encoding Na_{V}1.1 protein in the cell.

[0798] Embodiment 38. The method of embodiment 35, wherein an amount of the processed mRNA encoding Na_{V}1.1 protein in the cell contacted with the ASO is increased about 1.1 to about 10-fold, about 1.5 to about 10-fold, about 2 to about 10-fold, about 3 to about 10-fold, about 4 to about 10-fold, about 1.1 to about 5-fold, about 1.1 to about 6-fold, about 1.1 to about 7-fold, about 1.1 to about 8-fold, about 1.1 to about 9-fold, about 2 to about 5-fold, about 2 to about 6-fold, about 2 to about 7-fold, about 2 to about 8-fold, about 2 to about 9-fold, about 3 to about 6-fold, about 3 to about 7-fold, about 3 to about 8-fold, about 3 to about 9-fold, about 4 to about 7-fold, about 4 to about 8-fold, about 4 to about 9-fold, at least about 1.1-fold, at least about 1.5-fold, at least about 2-fold, at least about 2.5-fold, at least about 3-fold, at least about 3.5-fold, at least about 4-fold, at least about 5-fold, or at least about 10-fold, compared to an total amount of the processed mRNA encoding Na_{V}1.1 protein in a control cell.

[0799] Embodiment 39. The method of embodiment 35, wherein the ASO increases expression of Na_{V}1.1 protein in the cell.

[0800] Embodiment 40. The method of embodiment 35, wherein an amount of Na_{V}1.1 protein produced in the cell contacted with the ASO is increased about 1.1 to about 10-fold, about 1.5 to about 10-fold, about 2 to about 10-fold, about 3 to about 10-fold, about 4 to about 10-fold, about 1.1 to about 5-fold, about 1.1 to about 6-fold, about 1.1 to about 7-fold, about 1.1 to about 8-fold, about 1.1 to about 9-fold, about 2 to about 5-fold, about 2 to about 6-fold, about 2 to about 7-fold, about 2 to about 8-fold, about 2 to about 9-fold, about 3 to about 6-fold, about 3 to about 7-fold, about 3 to about 8-fold, about 3 to about 9-fold, about 4 to about 7-fold, about 4 to about 8-fold, about 4 to about 9-fold, at least about 1.1-fold, at least about 1.5-fold, at least about 2-fold, at least about 2.5-fold, at least about 3-fold, at least about 3.5-fold, at least about 4-fold, at least about 5-fold, or at least about 10-fold, compared to an total amount of Na_{V}1.1 protein produced in a control cell.

[0801] Embodiment 41. The method of embodiment 1, wherein the disease or condition is induced by a loss-of-function mutation in Na_{V}1.1.

[0802] Embodiment 42. The method of embodiment 41, wherein the disease or condition is associated with haploinsufficiency of the SCN1A gene, and wherein the subject has a first allele encoding a functional Na_{V}1.1 protein, and a second allele from which Na_{V}1.1 protein is not produced or produced at a reduced level, or a second allele encoding a nonfunctional Na_{V}1.1 protein or a partially functional Na_{V}1.1 protein.

[0803] Embodiment 43. The method of embodiment 41, wherein the disease or condition is encephalopathy.

[0804] Embodiment 44. The method of embodiment 43, wherein the encephalopathy is epileptic encephalopathy.

[0805] Embodiment 45. The method of embodiment 41, wherein the disease or condition is Dravet Syndrome (DS); severe myoclonic epilepsy of infancy (SMEI)-borderland (SMEB); Febrile seizure (FS); epilepsy, generalized, with febrile seizures plus (GEFS+); epileptic encephalopathy, early infantile, 13; cryptogenic generalized epilepsy; cryptogenic focal epilepsy; myoclonic-astatic epilepsy; Lennox-Gastaut syndrome; West syndrome; idiopathic spasms; early myoclonic encephalopathy; progressive myoclonic epilepsy; alternating hemiplegia of childhood; unclassified epileptic encephalopathy; sudden unexpected death in epilepsy (SUDEP); sick sinus syndrome 1; autism; or malignant migrating partial seizures of infancy.

[0806] Embodiment 46. The method of embodiment 45, wherein GEFS+ is epilepsy, generalized, with febrile seizures plus, type 2.

[0807] Embodiment 47. The method of embodiment 45, wherein the Febrile seizure is Febrile seizures, familial, 3A.

[0808] Embodiment 48. The method of embodiment 45, wherein SMEB is SMEB without generalized spike wave (SMEB-SW), SMEB without myoclonic seizures (SMEB-M), SMEB lacking more than one feature of SMEI (SMEB-O), or intractable childhood epilepsy with generalized tonic-clonic seizures (ICEGTC).

[0809] Embodiment 49. The method of embodiment 41, wherein the ASO promotes exclusion of the NMD exon from the pre-mRNA that contains the NMD exon and that encodes Na_{V}1.1 protein and increases the expression of Na_{V}1.1 protein in the cell.

[0810] Embodiment 50. The method of embodiment 41, wherein the ASO comprises a sequence that is at least about 80%, 85%, 90%, 95%, 97%, or 100% complimentary to any one of SEQ ID NOs: 22-24, 26, 27, 29-35, 37-62, 64-67, or 304-379.

[0811] Embodiment 51. The method of embodiment 1, wherein the ASO inhibits exclusion of the NMD exon from the processed mRNA encoding Na_{V}1.1 protein.

[0812] Embodiment 52. The method of embodiment 51, wherein exclusion of the NMD exon from the processed mRNA encoding Na_{V}1.1 protein in the cell contacted with the ASO is decreased about 1.1 to about 10-fold, about 1.5 to about 10-fold, about 2 to about 10-fold, about 3 to about 10-fold, about 4 to about 10-fold, about 1.1 to about 5-fold, about 1.1 to about 6-fold, about 1.1 to about 7-fold, about 1.1 to about 8-fold, about 1.1 to about 9-fold, about 2 to about 5-fold, about 2 to about 6-fold, about 2 to about 7-fold, about 2 to about 8-fold, about 2 to about 9-fold, about 3 to about 6-fold, about 3 to about 7-fold, about 3 to about 8-fold, about 3 to about 9-fold, about 4 to about 7-fold, about 4 to about 8-fold, about 4 to about 9-fold, at least about 1.1-fold, at least about 1.5-fold, at least about 2-fold, at least about 2.5-fold, at least about 3-fold, at least about 3.5-fold, at least about 4-fold, at least about 5-fold, or at least about 10-fold, compared to exclusion of the NMD exon from the processed mRNA encoding Na_{V}1.1 protein in a control cell.

[0813] Embodiment 53. The method of embodiment 51, wherein the ASO decreases level of the processed mRNA encoding Na_{V}1.1 protein in the cell.

[0814] Embodiment 54. The method of embodiment 51, wherein an amount of the processed mRNA encoding Na_{V}1.1 protein in the cell contacted with the ASO is decreased about 1.1 to about 10-fold, about 1.5 to about 10-fold, about 2 to about 10-fold, about 3 to about 10-fold, about 4 to about 10-fold, about 1.1 to about 5-fold, about 1.1 to about 6-fold, about 1.1 to about 7-fold, about 1.1 to about 8-fold, about 1.1 to about 9-fold, about 2 to about 5-fold, about 2 to about 6-fold, about 2 to about 7-fold, about 2 to about 8-fold, about 2 to about 9-fold, about 3 to about 6-fold, about 3 to about 7-fold, about 3 to about 8-fold, about 3 to about 9-fold, about 4 to about 7-fold, about 4 to about 8-fold, about 4 to about 9-fold, at least about 1.1-fold, at least about 1.5-fold, at least about 2-fold, at least about 2.5-fold, at least about 3-fold, at least about 3.5-fold, at least about 4-fold, at least about 5-fold, or at least about 10-fold, compared to an total amount of the processed mRNA encoding Na_{V}1.1 protein in a control cell.

[0815] Embodiment 55. The method of embodiment 51, wherein the ASO decreases expression of Na_{V}1.1 protein in the cell.

[0816] Embodiment 56. The method of embodiment 51, wherein an amount of Na_{V}1.1 protein produced in the cell contacted with the ASO is decreased about 1.1 to about 10-fold, about 1.5 to about 10-fold, about 2 to about 10-fold, about 3 to about 10-fold, about 4 to about 10-fold, about 1.1 to about 5-fold, about 1.1 to about 6-fold, about 1.1 to about 7-fold, about 1.1 to about 8-fold, about 1.1 to about 9-fold, about 2 to about 5-fold, about 2 to about 6-fold, about 2 to about 7-fold, about 2 to about 8-fold, about 2 to about 9-fold, about 3 to about 6-fold, about 3 to about 7-fold, about 3 to about 8-fold, about 3 to about 9-fold, about 4 to about 7-fold, about 4 to about 8-fold, about 4 to about 9-fold, at least about 1.1-fold, at least about 1.5-fold, at least about 2-fold, at least about 2.5-fold, at least about 3-fold, at least about 3.5-fold, at least about 4-fold, at least about 5-fold, or at least about 10-fold, compared to an total amount of Na_{V}1.1 protein produced in a control cell.

[0817] Embodiment 57. The method of embodiment 1, wherein the disease or condition is induced by a gain-of-function mutation in Na_{V}1.1.

[0818] Embodiment 58. The method of embodiment 57, wherein the subject has an allele from which Na_{V}1.1 protein is produced at an increased level, or an allele encoding a mutant Na_{V}1.1 protein that induces increased activity of Na_{V}1.1 in the cell.

[0819] Embodiment 59. The method of embodiment 57, wherein the disease or condition is migraine.

[0820] Embodiment 60. The method of embodiment 59, wherein the migraine is migraine, familial hemiplegic, 3.

[0821] Embodiment 61. The method of embodiment 1, wherein the disease or condition is a Na_{V}1.1 genetic epilepsy.

[0822] Embodiment 62. The method of embodiment 57, wherein the ASO inhibits exclusion of the NMD exon from the processed mRNA encoding Na_{V}1.1 protein and decreases the expression of Na_{V}1.1 protein in the cell.

[0823] Embodiment 63. The method of embodiment 57, wherein the ASO comprises a sequence that is at least about 80%, 85%, 90%, 95%, 97%, or 100% complimentary to any one of SEQ ID NOs: 21, 25, 28, 36, or 63.

[0824] Embodiment 64. The method of embodiment 1, wherein the ASO comprises a backbone modification comprising a phosphorothioate linkage or a phosphorodiamidate linkage.

[0825] Embodiment 65. The method of embodiment 1, wherein the antisense oligomer comprises a phosphorodiamidate morpholino, a locked nucleic acid, a peptide nucleic acid, a 2′-O-methyl, a 2′-Fluoro, or a 2′-O-methoxyethyl moiety.

[0826] Embodiment 66. The method of embodiment 1, wherein the antisense oligomer comprises at least one modified sugar moiety.

[0827] Embodiment 67. The method of embodiment 66, wherein each sugar moiety is a modified sugar moiety.

[0828] Embodiment 68. The method of embodiment 1, wherein the antisense oligomer consists of from 8 to 50 nucleobases, 8 to 40 nucleobases, 8 to 35 nucleobases, 8 to 30 nucleobases, 8 to 25 nucleobases, 8 to 20 nucleobases, 8 to 15 nucleobases, 9 to 50 nucleobases, 9 to 40 nucleobases, 9 to 35 nucleobases, 9 to 30 nucleobases, 9 to 25 nucleobases, 9 to 20 nucleobases, 9 to 15 nucleobases, 10 to 50 nucleobases, 10 to 40 nucleobases, 10 to 35 nucleobases, 10 to 30 nucleobases, 10 to 25 nucleobases, 10 to 20 nucleobases, 10 to 15 nucleobases, 11 to 50 nucleobases, 11 to 40 nucleobases, 11 to 35 nucleobases, 11 to 30 nucleobases, 11 to 25 nucleobases, 11 to 20 nucleobases, 11 to 15 nucleobases, 12 to 50 nucleobases, 12 to 40 nucleobases, 12 to 35 nucleobases, 12 to 30 nucleobases, 12 to 25 nucleobases, 12 to 20 nucleobases, or 12 to 15 nucleobases.

[0829] Embodiment 69. The method of embodiment 7, wherein the antisense oligomer is at least 80%, at least 85%, at least 90%, at least 95%, at least 98%, at least 99%, or 100%, complementary to the targeted portion of the pre-mRNA that contains the NMD exon and that encodes the protein.

[0830] Embodiment 70. The method of embodiment 1, wherein the method further comprises assessing Scn1a mRNA or protein expression.

[0831] Embodiment 71. The method of embodiment 1, wherein the subject is a human.

[0832] Embodiment 72. The method of embodiment 1, wherein the subject is a non-human animal.

[0833] Embodiment 73. The method of embodiment 1, wherein the subject is a fetus, an embryo, or a child.

[0834] Embodiment 74. The method of embodiment 1, wherein the ASO is administered by intrathecal injection, intracerebroventricular injection, intraperitoneal injection, intramuscular injection, subcutaneous injection, intravitreal, or intravenous injection of the subject.

[0835] Embodiment 75. The method of embodiment 1, wherein the method further comprises administering a second therapeutic agent to the subject.

[0836] Embodiment 76. The method of embodiment 75, wherein the second therapeutic agent is a small molecule.

[0837] Embodiment 77. The method of embodiment 75, wherein the second therapeutic agent is an ASO.

[0838] Embodiment 78. The method of embodiment 77, wherein the ASO comprises a sequence that is at least about 80%, 85%, 90%, 95%, 97%, or 100% complimentary to any one of SEQ ID NOs: 115-161.

[0839] Embodiment 79. The method of embodiment 75, wherein the second therapeutic agent corrects intron retention.

[0840] Embodiment 80. The method of embodiment 1, wherein the disease or condition is Alzheimer's Disease, SCN2A encephalopathy, SCN8A encephalopathy, or SCN5A arrythmia.

[0841] Embodiment 81. The method of embodiment 35, 37 or 39, wherein the disease or condition is Alzheimer's Disease, SCN2A encephalopathy, SCN8A encephalopathy, or SCN5A arrythmia.

[0842] Embodiment 82. A pharmaceutical composition comprising

[0843] (a) from 0.5 milligrams to 500 milligrams of an antisense oligo (ASO); and

[0844] (b) a pharmaceutically acceptable excipient;

[0845] wherein the ASO modulates splicing of a non-sense mediated mRNA decay-inducing exon (NMD exon) from an mRNA in a cell of a subject that contains the NMD exon and encodes Na_{V}1.1 protein, thereby modulating the level of processed mRNA encoding the Na_{V}1.1 protein, and modulating expression of Na_{V}1.1 protein in the cell of the subject.

[0846] Embodiment 83. The pharmaceutical composition of embodiment 82, wherein the pharmaceutically acceptable excipient comprises cerebrospinal fluid.

[0847] Embodiment 84. The pharmaceutical composition of embodiment 82, wherein the pharmaceutically acceptable excipient comprises artificial cerebrospinal fluid.

[0848] Embodiment 85. The pharmaceutical composition of embodiment 82, wherein the pharmaceutical composition is formulated for intrathecal administration.

[0849] Embodiment 86. The pharmaceutical composition of embodiment 82, wherein the pharmaceutical composition comprises from 0.5 milligrams to 500 milligrams of the ASO.

[0850] Embodiment 87. The pharmaceutical composition of embodiment 82, wherein the pharmaceutical composition comprises from 1 milligram to 300 milligrams of the ASO.

[0851] Embodiment 88. The pharmaceutical composition of embodiment 82, wherein the pharmaceutical composition comprises from 2 milligrams to 300 milligrams of the ASO.

[0852] Embodiment 89. The pharmaceutical composition of embodiment 82, wherein the pharmaceutical composition comprises from 1 milligram to 200 milligrams of the ASO.

[0853] Embodiment 90. The pharmaceutical composition of embodiment 82, wherein the pharmaceutical composition comprises from 2 milligrams to 200 milligrams of the ASO.

[0854] Embodiment 91. The pharmaceutical composition of embodiment 82, wherein the subject has Dravet Syndrome (DS).

1-155. (canceled)

156. A method of treating or reducing the likelihood of developing a disease or condition characterized by a reduced expression or function of Na_{V}1.1 protein in a human subject in need thereof, the method comprising administering to the human subject a pharmaceutical composition comprising an antisense oligomer (ASO) at a dose of from about 0.5 milligrams to about 500 milligrams, wherein the ASO comprises a sequence with at least 80% sequence identity to any one of SEQ ID NOs: 21-67, 210-256 or 304-1099, thereby treating or reducing the likelihood of developing the disease or condition in the human subject.

157. The method of claim 156, wherein the method comprises administering multiple doses of the ASO.

158. The method of claim 156, wherein the human subject is at most 18 years old.

159. The method of claim 156, wherein the disease or condition is Dravet Syndrome.

160. The method of claim 156, wherein the human subject is characterized by having:
(i) seizure onset prior to 12 months of age with recurrent focal motor or hemiconvulsive or generalized tonic-clonic seizures, which are often prolonged and triggered by hyperthermia;
(ii) no past history of causal magnetic resonance imaging lesion;
(iii) no other known etiology of any diseases or conditions except Dravet Syndrome;
(iv) normal development at seizure onset;
(v) a pathogenic variant, or variant of uncertain significance in an SCN1A gene;
(vi) at least 2 prior treatments for epilepsy that either had lack of adequate seizure control;
(vii) 4 or more convulsive seizures during the 28 days prior to administering, wherein the convulsive seizures is any one selected from Hemiclonic, Focal With Motor Signs, Focal To Bilateral Tonic Clonic Convulsion, Generalized Tonic Clonic Convulsion, Tonic, Tonic or Atonic (Drop Attacks), and Clonic;
(viii) a current intervention for epilepsy or medication with at least one antiepileptic drug at a dose which has been stable for at least 4 weeks, wherein the interventions for epilepsy is a ketogenic diet, a vagal nerve stimulator, or a cannabinoid or marijuana-derived product; or
(ix) any combination of (i)-(viii).

161. The method of claim 156, wherein the human subject is characterized by not having one or more of the following:
(a) one of the following mutations in the SCN1A gene: Thr226Met, Leu263Val, Val422Leu, Thr1174Ser, Trp1204Arg, Pro1345Ser, Gln1489Lys, Phe1499Leu, Arg1575Cys, Val1611Phe, Leu1624Pro, Arg1648Cys, Leu1649Gln, Leu1670Trp, Gly1674Arg, and Asp1866Tyr;
(b) a known pathogenic mutation in another gene that causes epilepsy, wherein the pathogenic mutation is homozygous in cases of known recessive disease;
(c) currently treated with a sodium channel blocker as maintenance treatment and an anticoagulant, wherein the sodium channel blocker is phenytoin, carbamazepine, oxcarbazepine, lamotrigine, lacosamide, or rufinamide, and wherein the anticoagulant is not an aspirin;
(d) clinically, significantly unstable medical conditions other than epilepsy;
(e) clinically, relevant symptoms or a clinically significant illness in the 4 weeks prior to administering, other than epilepsy;
(f) a history of brain or spinal cord disease other than epilepsy, Dravet Syndrome or a history of bacterial meningitis or brain malformation;
(g) a spinal deformity or other condition that alters the free flow of cerebrospinal fluid (CSF) or having an implanted CSF drainage shunt;
(h) clinically significant abnormal laboratory values prior to administering;
(i) aspartate aminotransferase or alanine aminotransferase>2.5-fold upper limit of normal, serum creatinine greater than an upper limit of normal or platelet count less than a lower limit of normal;
(j) clinically relevant abnormalities in the 12-lead electrocardiogram (ECG) measured at prior to administering;
(k) a psychiatric or behavioral disorder;
(l) currently or in the past 4 weeks, medication of an anticoagulant, wherein the anticoagulant is not aspirin; or
(m) any combination of (a)-(l).

162. The method of claim 156, wherein the pharmaceutical composition is administered into the intrathecal space of the human subject.

163. The method of claim 156, wherein the pharmaceutical composition is administered into the cerebrospinal fluid of the human subject.

164. The method of claim 163, wherein the pharmaceutical composition is administered into the cerebrospinal fluid in the brain of the human subject.

165. The method of claim 156, wherein the pharmaceutical composition is administered as a bolus injection.

166. The method of claim 156, wherein the pharmaceutical composition is administered by infusion with a delivery pump.

167. The method of claim 156, wherein the administration reduces or ameliorates seizure frequency, seizure intensity, or seizure duration.

168. The method of claim 156, wherein the disease or condition is Alzheimer's Disease.

169. The method of claim 156, wherein the administration treats seizure in the human subject suffering from Alzheimer's Disease.

170. The method of claim 156, wherein the ASO comprises at least one modified sugar moiety.

171. The method of claim 156, wherein the ASO comprises a 2′-O-methoxyethyl moiety.

172. The method of claim 156, wherein the ASO comprises a thymidine comprising a 2′-O-methoxyethyl moiety.

173. The method of claim 156, wherein each nucleobase of the ASO comprises a 2′-O-methoxyethyl moiety.

174. The method of claim 156, wherein the ASO consists of from 16 to 20 nucleobases.

175. The method of claim 156, wherein each cytosine of the ASO is a 5′-methylcytosine (5′-MeC).

176. The method of claim 156, wherein each internucleoside linkage of the ASO is a phosphorothioate linkage.

177. The method of claim 156, wherein the method further comprises administering to the human subject a subsequent dose of from 0.5 milligrams to 500 milligrams of the ASO.

178. The method of claim 177, wherein the subsequent dose is administered at least 1, 2, 3, 4, 5, 6, 7, 8, 9, 10, 11, or 12 months after administration of the previous dose.

179. The method of claim 156, wherein the pharmaceutical composition comprises from 0.1 mL to 50 mL of a diluent.

180. The method of claim 156, wherein the method comprises administering the pharmaceutical composition as a bolus injection over 1 to 60 minutes, 1 to 50 minutes, 1 to 40 minutes, 1 to 30 minutes, 1 to 20 minutes, 1 to 10 minutes, 1 to 5 minutes, or 1 to 3 minutes.

181. The method of claim 156, wherein the method comprises administering the pharmaceutical composition as a bolus injection using a spinal anesthesia needle.

182. The method of claim 156, wherein the ASO is diluted in an artificial cerebral spinal fluid (aCSF) solution.

183. The method of claim 156, wherein the ASO is diluted in a phosphate-buffered solution with a pH of from 6.6-7.6.

184. The method of claim 156, wherein the ASO is diluted in a buffer comprising 25-250 mM NaCl, 0.1-20 mM KCl, 0.1-50 mM CaCl₂, and 0.1-50 mM MgCl₂.

185. The method of claim 156, wherein the pharmaceutical formulation does not comprise a preservative.

186. The method of claim 156, wherein the ASO is present in the pharmaceutical composition at a concentration of from 0.1 mg/mL to 250 mg/mL.

187. A pharmaceutical formulation comprising:
(a) an antisense oligomer (ASO), wherein the ASO comprises a sequence with at least 80% sequence identity to any one of SEQ ID NOs: 21-67, 210-256 or 304-1099; and
(b) a pharmaceutically acceptable diluent;
wherein the ASO is present in the pharmaceutical formulation at a concentration of from 0.1 mg/mL to 200 mg/mL.

188. A kit comprising:
(i) a concentrate comprising an antisense oligomer (ASO), wherein the ASO comprises a sequence with at least 80% sequence identity to any one of SEQ ID NOs: 21-67, 210-256 or 304-1099; and
(ii) a diluent, wherein the concentrate is miscible with the diluent; and
(iii) instructions for diluting or solubilizing the ASO in the diluent.

The application's sequence listing, which the Patent Office published only in electronic form, follows.

SEQUENCE LISTING (1100 sequences)

SEQ ID NO: 1 - DNA, 164521 bp, Homo sapiens
ataaataaaagttgcattccatgaggagaaaacaaaaaaacccatcacagtgaacaattgaattgctccgtggacatcatgcctttctaagcaagcattgaatataggagatgtatttatgataaccagagacagagtatgtatagcttggctccataggggtggtgttctcggttcctatgtctaccttttgtattttccagcccttccctcataatgttactgggaaagttaacagctagcataacattttgaaaacccaaagtgtttatatcaacaagattattcacagtcaaattttcccataaatatcactgggacctatatttcttttaattttaaccaagagtgaaggtagtgagtatagagccctggctttagaaactaacctttaaaaataatgagataatgacacagtgaataaagatgcatcagggttgagcaaagttattttttaagattagaaaaactgattttgaaaatgcaaaggcagacaaaaaggatcagtcaagagggaaagaataaagatagaagagaagtagaacaagtcatggagcaaggtatctgagaatgtagaaatgaatgggaaaaattgatctctgaaaagatataaaagtatggattgaaggaaggaaggaaggagagggagagaggaaggaagggagagagggaggaagggagaaagggaaaggtaggagggggaggtaaagtaagaaaaaggaaggaaaaaggaagagaatggaaggaaagaaaaaggaaggaaaaaggaagagaatggaaggaaagaaaaaggaagggaagggaaggaaaagggaagggaaaagggacttagatatttttcactggataggaaagaaattgaggaagtttataatgatgtcctcttgcttgttgctgaggtgaggggctgagttatctgcaaatatgaggagtgttctaacggaatgataaaggactcaagcagttgagtaaaatcaattgatattgcaaattatccacttgtgattttaagaatttcttggtgatgcaattttcccatctatacttgattgtctagagtattttcctcctctagtgcctttgctgccacactgattaaatcaatattgattgacaacctcagtgggatatttccatgtgccaggaagaatagtactatcagcagtacccaattcatggtggtttagaaacacatttattttcttatataataagaaattccagtgcacacatgaagaatatgcaattaccagacatatttgctgtctttagtgcgacaagtttatatagttcgagtgtctgggctttgtgatacagatatacaaacatacaaacttatgcagtagagttgtctgtcccaatggttactagacttttggatttcatgcaccagtaaaatacaaatgggaggaccgacaccaggttgccaattttccacttggctaaataaaatattaaaaccaatgacccattatcacgtattctcaccatcatttccaaagaacatttaaacattaaatggtattagtctttagaaaataatctaaaagatacaatttcaggataaaggtctttaacttggatatgttcagctttataaatatttatggcattattcttaattttctggcttaactatagacatatgaaaaccttgtcataagggtgctgctctgtggagctgtgtttggaattactatttatacccacagtgtctggtccccagcttaaacagcaaagtgccaccttctgttatccaaatcagatctgtttagcatcaaatactggggtcttaaccactatgccgcagatcttttctaaaatattcttattttaattaaacagtgattattatgaagaacaaggaatgtaatcatttctgtgacttttcaggaagattactgctaggaaatgagaatagtagttaaaaaaccagtatatattgaattaattaccaacagtagatctaattttgaaggtagaaattataaagtccagggcatacaaaatatgatagtgtgaacacgcagacataggcacttcagtaacacacagcaaaaaaaaaaaaaaaatcctcccctttctaaagacacacacacatctatacttttatctatgtctgtttacatacatacatatatatataaatgtaactcatttttctttgaactgattcaagaatgagctgcagacattgttgcattcacccctaaatactttagcatgcattttcagagaataagaacattttctattttcatggaacaggcacactagtcttaacaaaattaggaaaattaacactattataatactaataactaataaacagtccatattcaaatttattcaactttcccaataatattatttatctgttattttttaatttgatattccatccagaattgtgtttagttgtcatagttctttgacctcatggaattctttagcctttctttgtctttcatgacattgacatttttaaggagttcagtccacttattttatagagtgtcctcaatttgattttccttgtagttagattctggttttaaaattttgactgtgtaccaagaagtaatgtggccctttcagtatatcttatcaggaggcacatagtatcagttggtctcataattgatgatatctttgaaggtattgtctgctgtatttctccaaagtatactttcttctgtttaaattttctacttaatagagaagagatactttaagatgctataaataccctattcctcatcaaactttcacccatgagttttaatactcattgatgattcttgtatgaatcaattgtcattagggtgattgccaaatagtgatttttctaactccgttatttcttctacaattgttaattaacattcaactgcaagaaacagatttgtacttttccttatttacttacatcagtatgtatttgctgattcttattcaatgaattataatcttttactatcatttattttgatgctcaacttgccccagatttggccagtgggaagccccttctagttggttcctgtgtcttactgacatgacctcatcattctttgaagaataattactttttagcacagaaaatatcatgccaaatatttcaaaatgaatatggagatttatatgattatgttttaccagttcttctctttgtatttggaaaggtaacagtgagtaatggcgtggatgggtagtataaaaagtctgcagggtttatcctataattctgacctaccttagttggaaatgggaatttttttcagctactaatatatcagaattaattgttgtgttgctttaggattgtgatgttatgaagaggcaaagtcagtccattgtacaaggatgggaaaagccttttaattactgtcccttttctggttgaggctatattccctcttctggcttcacctgatgacaagggaaggcttctcgttcctcagaaatttagatagattaatttagactgttaattttactatctggaccacccgagtaacctttccatgatatctgtgaattctgcactggacttcactgtggttcccccagttactgtttttctttatctgcaaaagttagcaagattaagaccccaagctgaagcaaggcacatctttgcttcctgctgactttcatgagctgttgaatcaccttgtgtcagccaggcaggagacagatggcatgctgaaatgaggcatatagaagaatttcatgaaggggacatttacaaaagtgtcagcaatgttaggagaaagctacaaggaatacaaaagcactctcaatgcagcagcagacctgaaggagcaaggggaggagtgattacctgaccccagagaaagtagcttcagttgtatgaggggcagtctgattggagtatgacttttcggggaggaatgagtccagtgccaacccagcaaagaaggaattggagaagaaatattcctatgtcaatcttctctctctggtgctttcccactggtgcttctcattggccaaaccaattgggagctcaaaggtaggagagcccatttttgcaatgtgtagaagtcacccttctgggacacacagaatgatgcagaagcagagagagtggctctggaggagcaaacacagtatcctacacacatggcaattctaaatttttaaatgatgatttaagggtttcttttcatagctcaaggggtcatccaccatcactctggcttccatacttctcttcctcctagaatcactagctatcctctgacaccagttcttcctcctaacagagaacacacctgctgcttgtaattctgggaggtcattaccccctacctccagtgacatatctaccctaggttttgttgtcaacgtgggtatgcctctgtgtgtgtgtgtgtgtgtgtgtgtgtgtgtgtgtgtgtgcgcgcgcgctccccttctcccccaatttgtaatgtaaaaaatctccatatcattagaatattctgttaacaaaaagtgactgggcaaacaataaaataaaaaatgtaatctttattagttttgcacattttaaatgttggttagcattatttagcataatagtagcattttccagcatgcagttcacgaatacagtttatctaagtagttttaaggaaaagaggagcctatggtttgcttctgtaagaaacacaaaatgtcctgatgtaattgactatataagttgactactctgtttttgtggaaaaaaaaattatgaagcccacattctatttagaacaatctagagcagcattactccaaagaaatgaaaacataaaccgaagtcagaaaaaaagaacaaaaataacataagcactaccttcaattcagttagtgcaggtactaccagaaatataaataaaattttaaacccttttccaattgcaaagcataatttggatatgaatcgtgaacctattttgctccttaaaattgtgaaataatctaaaattagcaaatgtaatttaaaaagcagaaatctacaactacccagtcttgttttcatgtcttatttagcaaatttctttcatgaaaaagtactatggacagaaagtaagaaaagtgattgtgatatcaacctgaagataatttcctcttcatatttatgtacataatgctgaaaaataaaataaagtgactttttacagtatttatatttgcttataaaattctaaacacatatttaataggttaagcagtgtgtttttttaaacatgtctgtacagtctggctatataccatatgttatccacttaaaatgtaaaaataaccaaaaagctgttaaagtgctgcaaactattgcttaatgacttaaataaatgagatctgttgaacaatttccttgactttaccactgacatatggtttctcataaatgagattctgagcagtgagagaaaccagatacagcagcatggtaatataaacatgcattgatagcatccaaactatctataaatggtacagaatacattttattacctgtgtaaagcttgcactctacatttcttgtggtacatatttgatgcaataaatactgtgcttaggtcattatttgtttgctcaaacgtgcaccacagggtaaaatgactatttacataataaatagcatttcattaacatatacagtgtcaaccttgctgagagccgaagatggctaaacaaagtgcaggaaaaagcagaaatttataaagagtaattttggtcaattcagtcttctggcggtggagggtgaggggcaatattcactattcaggttttttttttaatacaacaaaaagaaacataacatttatgactccaaacatttgaatgaagtttgcacctgctaagatttactggcctacccacaaataatctacttggtctaggggctggatttcgcaaaacaagatcaacaaagcacctccacttatcacccaattacccctcccagaaatatggtgaaatttaagaatttgtttttcttgtgactttttctcatgcatgatctctaagtgcagcatgccctcatgcaaaccacgactttgtgtagctgggagggccatgtggttgccataccccccaggtggcatacctgttatagaggtccttagcctatttctcaacagaaacttcgtttacaaaaatagtcacatataataaacacatggattaacaaaaagatgaatccactaacagattccataaaaatgtgacaaatgtggcagttgaaatgcaaacagtggatacaattactacactaaagtgtttcatgttaaacaaccccaaaatcacaggtttgcaccccttgaaactggtccctacagtctgactagccattgtgcatcttatcttcagcagtgtcagctggtagtgagaacagtaacctcctgtcaaggtcatctcccctttacacagagtcacagtttgctgacaaggggtcactgtcttattgtaggcactgaccttaaggagatttgtgtaaaaacagtcagtttggcattgacctcctaaaggagtcctgttgataaaaatacatcaccttcacaggctgtaaacaatttgtcacccaattatttttatttattttcatttatttccctttggctttttcatctttgccttcttgctcatgtttttccacaattggctttgtcacccggtcataggaaggtggacaagctgcagtggacatggtcagatcagttttttctgtaatagagttttcatttattctgtcaattatcatgtcttcttttataagaagattagccccacctttgattttgtttttattgtacgtaaaggaagcttgttttacagttcgctttaaaaggtggcgtctgtaagcacgctgaataatgacagcagatacttcctcttgttttcgttttaaagtagtagtgattggctgataggagaccttggaaggattggaagccatgaatcgctcttccatctgtattcgtagagcatccatctctccactctctcctagaacccgctttgtaaaagcaaataagatatcaagacagtggatccggtcaccactcaccatgggcaaatccatggcaatgagctggagtttgtttggttgtggcagattgagaggcggttcaagcgcagctgcaaactgagataatttttcaaattccatgaactgagttgcatcgggatcaaacttctcccaaacctcatagaacatctcaaagtcatcctcactcagaggctctgcactttcttcagtagcaacactgaagttctccaggatgaccgcgatgtacatgttcaccacaaccaggaaggatatgatgatgtaactgacaaaaaagaaaattccaacagatgggttcccacagtctcccttaactgagcttccagggttaactttattagggtcacagtcgggtggcttactgttgagaatgggtgctagcaatccatcccagccagcagaggttgtaatttggaataggcagatcatgctgttgccaaaggtctcaaagttgaacatgtcatcgatcccaacttccctcttaacataggcaaagttggacatcccaaagatggcgtagatgaacatgactaggaagagtaggaggccgatgttaaacaacgcaggaagggacatcatcaaagcaaagagcagcgtgcggatcccctttgctcctttgatcagacgtaggattcggccaatcctagcaagacggatcactcggaacagggtaggggacacgaaatacttttctatcagctcggcaagaaacatacctatgaataaacaatgagaataccaaccagtgaagaaatcatgcgttaaaataaacatatgtttcttctaaagctccaaggtaaggttcagagtcctgaacccagttatattaaatatgacaactatatataatatatatataattgtacataatatattataaatcttaattttgaaattcagcaataatttcaattataaggattatagtacttttttttatctttaagagatgtttataaactacttttagtttatgtaaagtcccaagtcagaatttaaaaagaaaataagttaaaaatgcacatttggccgaacagtagcagcccaacagtataggtacaagtttatatgtatacagtgactttttctgaaattgccatattctaaattctctatttactccttttccatctgaaagtattggtagcttttgatgctactttcatctccccatgatcttggtacttacttaaattccactctaatatttttatatactcatttatgtatgttctggtgcatttctgaaaggatcccaggttgatgctctttttagtatcctgtacttaatgttgtatttcaattctttttggtctcctgtacctaacactgtaatctcagtcttcttattttcagcttctctctccatttgctttttagataaaaacaatacttgtaaagttaaaaagaagagctcaagaaactaaatgccttcaagtttaaatgcctcattctgaaaagacgaagtgtaagagtgtgtgtgtgtgtgtgtgtgtgtgtgtgtgagagagagagagagagaaggagacgtgtgagaatacaacttttataccttagccacactagttataaccaaggattataattagtgggaatcaaaggctatatacaatgagctggatataaggccagtttcttcagagaggggagtggcatgaaaatctgtccaacacaggtgcctcgttttggatagtaaaatattgacccaatcatatcatcctgtttagggaagaatgaataggcccacagacagatgctttttactttactagagctttagttttgtctaatgaaatgagctattgctcatgaggctagttatgtgttccaggctttgaagtatagtactgatgatgtcccatgccaccttatttcccttgtgcatcattatgataaacccatttttaaggtagtctagaaaatctctacatgacacttgcagagaacctactatatgcatttgctaatgtttagtccttgtctttattctctttttatgcaatacttttccttatcttgaaaccactttccactaatatctatatgctggtgactccatgtctattctctaaagcaattttcgtgagtaccagactacatttctagtcttgttaacagaaccatctagatactatattggttcttcaatctcaacatgtcaaaaacatttttattttagttaatagcacagttctagttcaaatgaatgaggttttactacatttacactaagtatattgttctaaatggatagaataagaaacaatactgacatatagtaggagacattttgttaaaaaaacaaacacacttggataaaatgtatcaaaatatttacagtgattatctctgattgctgggatgatcttgaatctaatcttgattgtttcagctttcacttttatttaactgaatttaagaactttaaatatttcttacctacaatggagagaatgacaaccacaaaatcaaaaatattccatccaatggtaaaataataatggcgtagagagatgagtttcagtacacactctccagtaaatagcacaatgaacaccagattgatgcgtgacaaaatggtagtcacatattcactctggtcatctgtttccaccatcattgtgaccatgttaagacagatgagaatcatgatgcttatgtcaaaaacttgtctggttacgaagtcaaagaccattccttgaaatttgttctgtagagaaatagaaatgcttttaacaacaaaggagttttctcatgtgcattagcattaagtactttctgcattaattgactttctagtttcttgcaaagtagtcattggccctgatttttgtaagaatgatttatagcatattaattgttaaaatttagttatttaaattgccatttactaatgtgtatttctcagaataacaatcccttatccaaagaaggtttctgataaaaacaaacaaacaaacaaacaaacaaacaaaagaaacattcaacactgtatacttcttccagaggtatgcaacacatatcaacattttaagattatgaaaaggtaagaaacccatttaatttttttttcaagactttccaatgatcagctggaccatacatccattttaaaatatagtactattaatatttcacttgttgtattctcaaataattgttaaggagaatttggaatttccaagacacatctataacattatgcatttaaataccacatatggcaatactcatattcttctaccaaatagccttggctaacattgtcagacacagaatcctgaaactgcacaaggataatgagaccagaatgacatttcctatatgtttatgtcaaaaaaaacttcacgttctttgtcgttgatctgtgattctgcttcccatttctgccactgctagtcactgaaggccatctgcaggcttatttctttgggccactgaggaattctgagggaattttccaacttatatttttcctaaattgttgtttcatttctactcttagtgctaaattttaatggagaaagtatatatttctcatcattctcaggaaggcaatattcaatcatcacaatatgaatatttgctagtagttttttccttgatgcaccctaggaattactgaaacctctcagatcatcatcataaaaatatttatagtgtgggataatagctgtacattttcatagcaatttgtttatttcatcatggaagcatgagtattgttatttatcatcataaactgtaattactgaccctgacttctgcagacattagtaatacctaactctatagccatacatatgaatagtagatactggaattctttcctcctttaaaacacttagtatctctagtgaaaaataaaatagaagtaaggtgttatttcactcaacacttcatttcttaaaatattaggaaattgcatttcttacagccccatcccaaggtttacttctttccctgatattacttggcaaccattcttgagttgtgtgattaactttctcttgtgcacatcacattgtctatgtgtccattggccaattaatatggattgtaatggggtgcttctaaatctcttgaagtcaagggtgtatcttctatttcttcttgttcttttttggtctttaattttttttgttgttaccattatcataaaagatacaaacatcacttttagatgatgctctacaagtgaaagaaattttttctactggaaatgttagctactttcttttttgtgagacaagcatgcaagtttttgtttttgtatttttcccccatatcatttgatacttcttactcctggtcgaggtataggcttttgcggttttttcgatcctaattttttcattgcattatagtatttcttctgttcttctgtcataaagatgtcttgacctccaaagtatagaaaagaaaaatcaaactggttaaaactgtgtccttttgtacatttttttcaatgttaaaatagaaaatggatggctaaaaaaagaaatacaaaattcaactgattagtataattatatctgggatttaaaatgtaaaaaaaattgtactctttaggtatgataatatttaattccctaaataattcaaaattgactttattattattatcttatgaagacaaacacccccaaatctcaaaaaggttaagtattttacccaagaccttatgcttagtgagtggcgaaatttggttcactgagataataaatacttggtaccttatactatacatactacctttatgatgttaaaggcaataattttcttatttaaatgtagcaaagagttagaggatgtatactgcaagacagtttggagttactcattaaaaaagtcactctaactctgtcaagaattggaggaaagggataaaaagaaaactggatgagttagtgagagatttaggggataaatcagagctcatagcatagtaagtatgggacagaccagtagggatagaagattggaacactggcaagtaagtgaaatagagtagcctgatattgacttaagaatactactggtaataagaaaagggaattgaggggagaatgttctgtagtctaagaaagcactcattcattatacaaaaagcaaacctactgaacaagtgagatgaagcaacagtacataaaggaagaaatacaaatggccaatgagcatttaagaacatgttcaaatgtaataaaatacataaaagtcataacaattaaggttataaaagtcataaaaattaaaattaaatacagttttcacctattaaatatcaaatattcaaaaacagaatgtttggtgacagtgagggaacggtggcatgggtgttcatacactgatattgggagtttgagtagttatattactctaggggagtaaaatacttcattgtgggaatttattctcaggaaataattaaagccttattttctgtccctctctctttttttttgtacaaaactttcaacaaggtactatttaaatcattaaagattaaaaacaatctaaattatcaacctactggggaatgaataagtaaattatgataatgcatatatgaagacttaacaaaatgagaaaatacttatgttaagtctaaagtggaatttataattatagataaaaagtacaacaataagagtatgtgcagaaatactctgaacagaaaacaaaatgtgaatggcagcagttacttccaagtgatgatatttatttactttccatatgttctataatgtacataggtaattgggacaatcaaatgagccttataaatgataaataatagtcatacaattcaagactgaaacggatagcttgtatttaaatatcttggagaaagaaatgggaatatataaaagaaatcaatgacagaaaaaagcgtaaaaataaacactagaagaagcttacatccagtgcctaatttattgcaaagaattagttggaaaatatattttcaagggggagtgggtagttgtagggataaagtaacaaattgcttttgggaaagaggcatattcggttgctttctagttttattctaattattattttttaaaagatagaaaatgtttcttgataatgaataagaggaggaaaaactttatgaacctatgaacaagagtgtggaacacagttattcttagctttctatagccggaaatatatggatagtgaatgacagaggaagaggaaggaaaaatcagttataatatatactcccattttgtttctaaattcaagtactcatttggcagagaaaacactccaaggaataattttctatctcagtgggagagaaaatattagaaatacttatcttctttttctgctggttgaaattatctatgatgacaccaataaacaggttcaaggtgaagaaggacccaaagatgatgaaaataacaaagtaaagatacatgtacagactttcttcatacttaggctggagttccacctaccaaaggggaatattttgtaaaatattaccatacattttagtgctggaaatgtcactggtgctttttcataacaatagaaaaaattattcttactaatatgtcagcattttttttttttctgaatcaactacctctaaaaaacatccctgaaattggcctttagggatgttttcatgtgaaaaatatggctattatgacattctaaaatctatttttataactataaatacaaataatattcttccatttgaacagtaatgtgctaaatttgcaagcttttaaggtactgaattttagtaattttaaaattattaataaaaaatttaaaactgtaaatatctacaggctaggtttagaaacagtcattcatgtatgcatgaaataatgtagcaaataagaaatgagttgttcattcagatgtttggcactttaccctaaagtaacagttattgaatttttcagattaagtagacatagatggacagtccattttataaatcctcagttgattatttaattcctagattgtgcttaaaacaaatgggctattacttataatttagtaatggactgaaaggtcactatagttttttaacagattcatgtccttctaaaagcaacaaagttaaaaaccaactaaacacacaaaacaaaatataagtgacaaagtgaaataaaacaactctggaggttatcaaaatgatattcaacataaaactaaagctatttgaaatgcacttcaagaaagataacatcaaactctatcaggttgaagactgcagggacagaggttattctttatgatgataaactaaacagatgggacttgagaatagaaagatgaaggttgatagaaaatactacatcttacaaagttttgaagagcaaagttggaatgagcatgaatttcagtttaggtcttggagcctgaaagaggctgaaatcaaataaaataggtttatattttggtgatatacacttaaaggaatctgttggtcacagaagtgattgcaacattagtaaaggctccagtcaatttatgaatgcaaaaatcatataaaaacattcttttatatggtttaaaataggattatttgaaagaaatcatcacagtaatctaaggctgacagaacaatatccataacttttcatgctgtctaatatggagggtgactatacatttcaactaatgatagaaatcatatatttcttcaaatttggtcccgcacactaaaattactactaattatataatgtgtggataaataggaaacaaaatagaaaatatttaaaaggaaaatatttgttagttactaaatacatgaatttgttactttggttttcaaaataattcatgtgttgaattatcttagtaagatctttctgataaacattgctatgcttgaatatttacctgtcacactttttcccaaatattttaaatcaagatagaatcatttcatttggtcgtttatgctttattcgattaattttaccacctgatcaatattgtaaaaagacttagaatacaaggaatacttacatttctggaatcaactgctgcatacattatatccatccatcctttgaatgtggcctattaagaaggacatgcatgttttactttggagtaaaaataatttagacctgatgtttaataaatattcttactgatataattttcaaaagggaatatttttgaaagacatttcaaaacaaattttacacagattttggaccaagacagtattttagtatggcttttcatttctagaacacatattgaacaaaatggccatttgatatatcctccccttgataaccaactcacaagcacttttcaattctttagagttcatggtgtcatgatatttaaagcagtattaaaatttgctggagcactttttagaaagtcttacaaatgccaacacatgggtcaatagctctatcagccaaataattacaacttagatctaaggatcatctgctaaaatttatctgcagggtgatcaaagtgattgaaaatttaagatttctctttattgtaacaatgtaaggatagtaccaggatacataaaggcagggttgcaactatccttttaagaattttggagcaaaacatttagaaatacaatccttttaagaattttgcatcaaaacatttagaaataaccccctattctattttctttctgaaattcttgaagataataagttaatatgaataagaaatgtgaacaatagtacagcagacacttggcactcacaggatgaaggatactcaggctaacaacttacagtaatttgttacttgtcctggggcatgaattttgagtcctgtgggcctaaaaggattatcccttagctagtgagggaggttagcaaagcctttagcgtctgtatcacaatatatctttgttctgataacgctaacccttgtgaggtggtggatttcatgagacaaaagctaagcaagggtgtgggtgacagcagtgaaaagaaagtaatgattcctagctagaaagtacaaggcttttgtatatgaaagagagagagatgtgttaaatatgtcagtggcttaggtcaatgatagaacaattccattacacacttggtatagaaacaaaaaagtgattcaagggaccatttcaatgacttactaatcaatagagaggtgattctataaaagccaaatgtgaagcagtattttagagggttttttttttttttggtggcagaatttatttaatagctttgtgcaggaccatcactgtattttcagaattgcttacattttaaaggattgcttaaaatttttaatttttctttcctcaaatttatggaggaggtggttgctttagtgatatttacaagtatggtcattagttaagggttagaataagtgcccaaataaatatcatcatgtgtcgacaatttttaaagaaagcattcttgctagattttttttaacttttgtttttatttgtctttagagacaaggtctcactatgttgcctccactggtctagatctcctggcctcaagcaatcctccagctttggcctcccaaagagctaggattacaggcatgagccaccatgccccacccgttcttaccagatttaaaaaatctctattttaattgcatgaatattattcagagtagatcaaaaatgttaagaagagaaataagaatttccaacaaaaaggtgggaagaatttgtaaagtaatcatagttgacacctctggaagagctgcaaaagggttttgaccagtgttggtttgtttgcttagttagtcttctggttgaacagttgaaatcataaccttggtgagcaaaaattgatttctgccctaaagacactgtagaaccacaagggaagaaagaaattgtacagtcttttttttttaagctgagttttcaaataatctggactcttattttattccctgctttgttgtggtgctgctgcagctagaagcagaatcaaatgaaaatgtttaaagggctaccttttttaaatataaattataaactatttttcttggagacccagtcttagagacccagtagtgaaaacattaatatttaggacaaaatagacttaaataatggtgctgaaaggtcatttgagataagacaacagctgcttttgcttcatttttgtttctagttgcttccaggtataattctctctctttttttttttttttttttttttttttagatggagtttcactctttgttgcccaggctggagtgcagtggcacccaccgctatgcctggttctaattctaaaacctaaatgtcattccccaaactttgatccaaataatagaactcagcagcagttaatccctaccaattaattacaatccaattaggtgtattaagtgtatgtgttttggaagatgatctatctgttaagtgtattccgttttggtagctgatcagggaaacaagccttctaatcacaataaaaaatggcaaagttactgatttattaatttacttgtttatatagaaagagcaatatagaaacaaagaaaatacaagaaaaaagacaaagaggtctttgtttggtctggtcactactgactatatctgcagtccttacatgtaataaagttttcacccatctgggctcataaacttgtactaacaaattgaaattttttaaatagaaagaaatatatactttttcttaggaactaaataatagatgtatgtcattattttgttattattccaaacaataaaaatattcagagaaaatagtgttcacttacaacttgaagcaaagagagatacccaaatcctacattatcaaagtttactttcacatttttccatcgagcagtctcatttctttctattagttttaggcaatcagtatgattattcacgtcttcgatgtcaaacctgtcaccagttgtggtgttaatacagtggtagaatttgccagcaaacaaatttacgcccatgatgctgaaaattagccagaatataagacaaaccagaagcacattcatgatggatggaattgctcctaaaagggcattcacaaccacctaatacacaaatggaaaaaaagaaaagtcagaattcttatctgttaataaagaaaaaaaattcccctagtaatctctggtctttccattctttttttctatcaatgctatttattctaggatatgtaaaagcaaggttcaaaaaaatcttaaaattcatttttttttcttaagcaatacacttaggaaaacaactataggcaatataaccaagaaatgaaacaaaaatgtttttaaaaaaaagggagggagaagcattaaaaggttaaaggaaaaggaaaatcagaggaacttgctgccagatgaagtcagaattgtgttatcagaataaagaaaagttaaaaagcctatacagaagtttaactcattttaaaaaggcaatatattaaagaacaaaactaaaacatttggacctgagttgatttgaccaatatatttttaaaataacttaaaaattcagatgataaatataaaaaatattattaaatacctaatataattgtctttaattattcatgcattgctatgactaataatttttgcataagaagcaagacaatttgcattatgtatttcattagatcatcacatcgtttatttcaagctccagtcatgtcagttgtttcatttactgagtttaattcaaaaaacttatttcaaatgaaacataatagaaatcatttcttaggaaaataagaaaaagagggatgccatacatagttctcaaatctgatgtgatcacatgaagttctgtgttcaattattatctacttttttttttttctatagaaggatgttttccccctctttacttctggaccactagttaaaaatcttgagtgttcatgtttggaaacaacatagggatggcttccttgctttttcctccatacctcccactggagctgcacaggagtggctaagagggaagctaaaaacagaccctaaaatgcttataaggggcagctgcctcaaacttggacattaatagctaagtttaattccacctatgtgcttgtattattcttgtcagtctgatccaatggaagtagtcgtcaaaacatcttctatttgccatttgatgccagtgtatttttagaacaattttttttaactgcctgtctgaaaaaaaaatacatgagccaatttcttatacttctgatccctgtttaaagcctgtaaagaactctaggccttctggggaacataaaacagtgtgataagtgggccaaagaaaataagaataccagtaatgacaaaggtggaggggatgagtatgaaaaattaatttggttgagttatccaggcagaaccaaatgatgtggccgatgcaactaccaagctgacacgtgacactttgccttatctcatctgactgtctgcattaatacaatggacttcataaattctcgttatataatttattttaaatggatgaatagaattagatttctttcagattagagatttggaaattgaaatcaagttactatttcccttcttttctgaatattttgtccactatccagattacaatgctgtttctagtgtgtatacacagagtactaattaaaatacgtattttgccttcaacacccaatttagagtatgagcagaacactgattatctatacctatttctcgattttcttttcacattacctgtctcacattttttctttgaaacgtttctcagctttgccacctcttttccattctcacagtcaccacctagaactgccctctgttatttcatacttgcactgtcatctgtctcctaaccttctccttcatttaatctatgtaagatgaattaatcttccccaagtcccacttgaaagttatttattggctctctggtaactaacaaatatttttcttaccttggtattcacatcactccacaatctatatttccagttttaacttccctggtcatctatacttcatgccacttcaattaatataataaccgtgtgctaatataattgccaggtgattgagatgccatttacattgaaattccttgtctaatagctcctcttctgaaatactctcccctcttaaaggctttagttcaaatagcacttctttcatggagcctaactttgtcccccagtttagcctccaaaataaagaggaatgttttcccctttgaattcaagaatcagaattctagtactgaacagaactgtacagataattcagtattgcgttctcatttggcatatgagaaaaatgaggttaaaacaagttaagttcagaaagtagcctataaatagcatttagtgctgtttccagtctacgtggaagagttgctcccacttatctggtacccatattactctgtactagagttcagtgtaatcctgacagattgtaagattttctaaaaatttaagatgcaaacatatgttcgtgaatcttccagggccttgagtgtcttgaatataagaacataccagagagctttgaatataggaataaaataatggttgacaaaaatgaatgggttaatgaagcaaagtttagattagtatttattgatcaaagcataatttttaaatgttatttctgaatatgggatgagaataattaaggaactgagcacagggagaagtttgtgcttaggtaatatgtttgagaggtttactttgaaactggggattgatttagagttaaagcgaactctatggaatttatgacgcaagcatgtactctgcagcagtgcacttcaggatatgatttgcaaagttggcatacatttggcccagagaaaagttttattttttttgtgaacataaaataactttatcttagaaaacatctggcacagtattggggagtttattatacaaagctatagtcatatttatgatgtattaaattagacaatgaaagatcatagaaaagattgtcttttcccaagagttccaagccattccttggttcagcaaagaaggaggtgtattaacttttttcagtctcaataaagctgcagtaattggttcttatggggggaagaaagtaggcagaattagtctgaataaattggaaagaacaaatttcaaattgaactttcaggctacatgaaaggaaatgtctgagaaaggagctatcttaatgaattaatactgtactagaggttgtttcttctcagaagcttttttttcaaaacaatcatcaaataaagtttctctactctagcacaaccaattctatttctggttcattacctgcatttttaaaaataagtctacactaaatgaaggattgataattaaatatgcaaattcacattagaaattttcatacatgcagaaatgtctttttatctgaattaattactttgaacttcaaatcaacactattcatgaattctagtgcttctctaatagaaataaagaaaatctatgtgaataaaaataaaagtgggcaaagtaggaatcatccatttttaagtataaagaagaataatagaatctttcttaaaaatctaaaaaaattatgttgtgggttttaattaagacagtttttttgtaagctatgatatattggtgatccaaacaaaaattctgactttttctgtctctcgaatataaactcttcttcttgtataatacacttaaactttaagaataaataaaatgtagagttatgtttatgtatgttttcactgtgttatgttttaaaatcctagaaagttagttgggagttacttattctaagaagtgagtttatgccttaaattttatcttaatactcatgataagacgtttttgttttatttctaggtatgtattctattctgcataattcaaataagtggatttttttattctaactttttgtttacaacacaattcacatgtgcttattcaactatttcttaatatatttttgccttgttaacattttgaaaataaccccatatgaacttacacaataaaaaatgagagtggtcacaatcaataccagtcttatgaaacctgaaatattgcaccctagtatctgctcatacatatcaataatcaactgatggtatctaactggtaattttcaggacccagaccaatgtactaaacagcaggggctgtatgcctcaaacagtatcatgagcttaacaagttaaattgttttttcacataatcattctacaccagggtcccccgccctcaccaatccagtaatctccccaaagatggataactccatatacacataactaaatcatattcaatgaaacttaataaagatatcaaccattggggttaaaatccacagagggtaaattcataaaggtttttttttttttcaaatgaaatttaagacaattgaaaagaggggattaggatgtaaataatgtattttccctactgtggtgcaataatagtacccttcccaatccctccctcaccccactacacataagtcacagtgcaaggattaaaggtagcaaaaggggtaatacagtacccataataaagggctcaggggaggaaccagcgctccaccccatccaagttggagcaagattatcctatacaaaatagaaatatatagtttgttattagttagaaatctgatatgacagaacatttggtgttactttttgttcatgatgctctccgtctgtttccctatccattaagacttgagttcttttgaaaaagaaggtatttaagatttcctaggttaggaaattaaaaatacaaatttaaacacaaattttattttaccctagatattcacgacatcaattcactcagtttaattttacaagttgaaaaatttggactggaaatttgaaatacaataaatgtttaaaagctgtcagccagaaatgtgcataaaacatgcaaaacacaaagtgcaacgtgatgataatttatttgttactttctaacttcttatcaagcactgtacaacatgctttattcagtaatgttgcataaaagcacatgctttgaaaaaataacagaacaacaaaaataaaatgagtgcctgagttacgctttgacgcagctattgtgattttatgctgctagggcaaagaattaaatgagagtttctgagcatgttcaaatctcacttcccaatcataatcatcattcttatatccaacctcaccatcattcatgattatatttttacaaaataaaatatccaaacactagaagtataaaaaatagaatcaattataacgttattttgactctacaatgccaaacacgtattgaagagattagtcattttagtgctgtgtgtatgttgtcattatgaggaatagagccatattcataaatctgaccatttaaactattagttatatcactatcagcatttataaggattttatgtctaaaactccaagtttcaaaaactaacctcttttaatataaaaggcattattgattaataattatagatatggttatttctgagaaaattaaaagtataccgataagatcagcttttttatagaaatgaagtgtaatgtatggaaatatctgagcacttgaccaatgaatttaataaactttcaaatggtcaaatgtaaaaggtttataatattttcaaatgtttagcattgttcagatttcacaagccatataaaatatattattttgattcaggcaacatgttttcaagtagaatgtacacaaatgacattttttttctccagaactgaaactgccagtctgaaacaaaacaaagtgacatttaattggaaaacagacttaattcttatacaccccagagataatttctgttaacattttggtgaaaatttgaggctctctgtgagaaataaaagaggactacttgtattatattgttctgagttgtcgataatgaggacaaagttttcatatatgttagggaaatcgaagacaagtcctacgttcttacaaagtgacatttataataagacttgagaagagaacataaggctataaacaatctacaaagtgcaaatggaagtctacaatacagcttagtttccataaaagtaactacaccttaggaggtgaaagagcagtgtttttctattggaatcacacaattcagtgttttgttttgataatatttttttttaaaaaaaagcagaactaattttttatattatatatctataaactaatgcttcatgccgtaaaaaaaggcatggaaaataagtcaataatggcaaaatttctaatctgttatgcatgatggaaaatgattattgcatctttgaaaaggataaaataacattttgtgtgactctgaccaataagatgcaagttaaggttaatgtataaattacctatagtaatgagtcaaaattatattttctgttcattataagtgttttactttattgttataaaaatgatgtggatttgtatgtaatctttaagttagtattactagttttataaattcagtcaacacttaatatctaaccatctaatcttgaatatattcaaataatgcaaactttggcattatacagacaaaagttttaacaactcctttcatttttttcttaacactcatacttaggcacatgtgtgattcacattattttcaggaaaactcgttaagtacagtatatcatcacaaagaataagtacctgatatagaatttactttagattaccattatatcattacacatagtactttaataatgcatcagcttttttttgtatatagatttgtaaggaaactcccaagatggattaggaaataaagtcatttaaataagcacagcagataaatgatattatatcatttcaagagaggcctatttctcttgcatatcacctagaagtaaatatgcaacagataaaacaataaagtagcaattttgcaagaatttgccattccttttgcatgcatagattttcctttttctaaatttaatttagtttaattttggctatatacaatacttcaggttctttcatttttcttaccctcatcccttcaaatcgagataaggctcttagaggtctcagagctcttagtgtcctgagagatttgatggctccaagttctgagtaacccaaggcatttgctgttaaactgaccaatgaaacctgcacacacaaaaataataacaattaataaacagaatcatcattcaatgtgtagttgctatataatacaacaagtataatttttgcttataattattcagaggataaatgttcagacattttcagtaaacctttaaaaaattaaagaaataatttcagtttgatgtaaaggatgtaatttttaggacattaattaaaagctagttgaaaaaaaatccttaaatgtcatataatttatcaactgaataaatagaaaaaaaaagcaaagtaaaaattagtaaaataaaagaagaaatcaaggtggaaaaaaattcattggctattcttcctttattttattaagttgctgttgaatttaaggcttttcttgtagctagttataaaatacaaaaactgctgttgtactaaaaaaagcaggaagtttctactgtgcatcagtatattcaactaatcataattggtattctcagaaattaatgaactacatcagttttgaaggtgatattttgtcttggtaataccttgcattttcacttgtttatttttacataagtaacttagaaagaaattccattacaaaacttcctcaaaattttttatactaatttatggcttctgccatgatatctggccccaaagggccaatcaatgaatatttaccaaatacacacagcaataaatttacttcatttgtattcatttgtaggtaatatacatgactaaaggaaaaatcttacgtatctaattctctaaataaggaatttactaaaactttgtattcaaggaagattataacttatttggttagaaagatgctagtattggagaattccgcatatactgcacactatttttgtaaacttttcttttttaaaatgtattaattgtatcatatttaatatacttcttacattatttgagatgtgctgtaattagtccttttatagagtgctatactgatcttcattaaagaattaaaacagaacattgaaaataaagatattattgttacaaactacaaaattttctataaaattattttcttaaaatgtttcaaaaatgacactaaaaaactttcatgaaaaagctgatgtgtaataaacataatagaaaaaaaacctcaggaagttttaaagggttaaattacatttagatttaaattatagtgtaaacaattctgaaattgaaacataatgtaacttctaatgcttgaaacctcaatattacaaactttctcccttattgatgtgataaagcaattcttcctttgagatttctctcaattggctcatttcacagtaacattgttaagttttttaaatagcttagttttgcctttgttcagggtcaaggaaatataatgcattcatgattcttagctcaagaaacactttccacaagaaaccctcatagtcttgctgggttagtatctttttggggtaaaactactcaatatgaaatcaggatagttttgctgtagctttctaaagctgaaattttgccaagttgataatagaaaacatgatgcttaactttaacacatcttgaagtcagtcacttgttttcagtaaatgcagtattaatcattggggatacaaattctataaagggctgtttgggcttgccgtaaatctagtttacattctaggaaaactttcactgctgaataaagtagacttctctttccctacactctacataccttacttcctataatgaagtcataatccatataatctactatttaaatctactctttaaaaagtttgagtagatcaaatagaatttttttaaatgactgtagcacccaacagcatcactgtttttattgagtgcctttaatactgtacaagttgggggtcaagagtttggggccaagaaactaactcagtggcacaaaatcaacaagtgatggtcctgggatacaaacttgagtctgtctgactcacaacataaaggatttaagcaacataccttttaagttccctgtttcactactttccctacaaactgctgatgtgttgttttttctttagctttctcagataactagagaactaccatagattccatcccccaatgttattttaaatcagaattaaattagcccttgtcttccagaaatgacactctcattgcatatatgcgtttagtggttattatagtctgtcaacataacatagtggtctgagactcactattgtagaatttgaatataaataagacaagctaccttgaacagagacaaaaatatgaacgatacctacatcaacaattaagaagtccagccaacaccaggcattggtgaaatatgtttgatagccatatgccacccattttagaagcatttccagaatgaaaatgtaagtgaaaaccttgtcagcatattccaacatcgtcttaatcgtctttcgctgatcaatatatatatcttcaaatgcctataaagaaaatgttacacattattagctttcaaaaataattatactccataagctatttaaaaaattaatcatatgcatatgacatttcattggaataggagggcagagaaacagtagttactgttactttttttttttcctcgcaaaggtcttttacttatttaatcaggggaaagactattggtggaagaaaaagaaaagtatgattccaatgaattaatttgacttagtcaggaaatagttcttgatgttgtatcctgatgtggccatcccaacttgaagttatgtattccttttgtttcatttattttgcttccttctattggctttttttttttttttttttttttgctatagaaaggaggttgaagaaataatgaaagcttgtgcttttgtaaagcagaaattgtgattgatcttcgcagtctccaatttgactaaatagttgggttcatctgcttcttttttgttgttgtttgttatttttttaataatttatgtttctcaacagacatacagtgtgacaatgattaaatgaaattacttttcatttagattctaatatatattcttctattatgaacctctcgatgtttcacttctaagtatgcattcctttcaacggtgaaagacttctaaagtagcgtgtagaaaatatttctttcttcagaaaaattacaggtaaatatatgtctgtgttagaattataaaaagttaaacttgtaacacacttgcatttcaatcaggcaaactctgtttctctctctttctttctctttttctatctatggtatttcctttgtgttagtgtttccctaaaatgctatctgtatgttttatttatagttttataaataattttcctataaaaataaattgattctgatgaagtgaacaccttgttataaagataaacccatccttaaatgaatctcttgggcatgctgcccaatatttattgttaccaactttcattatttcttaagtagcacaaaaatagtgagcacacaattggaaaaagacagagaagtggtccctaaggacttactactgtccatcaagagataataataataaataccatttagaaacaaaattcgtcagaactcagagaatatatattcccatcccagggcttccaataactttttttaattaaacaatgagtaattgaatattcacatcctttggtgttaatgaataagctgaagggctacactttctgggctatttaatagtaagcaaaaattaatgattagcttcttaaaattatatttacatacatagtaaaagttaatccagaaatatagagttatagagtaaatctatagaagatacaaggtgggataattaaaaatgcattggatactaagacaatgaaacaaaggattaataagtcatcagtattagagtgttctaaaaattagtgctgtatcaccttttcttaatctcactcaccagagcaccactactaaggagaatcatgaaaacaatgaaggtctcaaaccagttatgttcaactattcggaaacacgtccttctcaggttccaccattgttttcctctgccttcttccacattgatttgacaacacttgaatctttgtacacagcctgcagaaagtgttgaaataaaagtagataaagtgtctctgcttccataatatcctttagcaatgtccttgtcttgtctttttattactatgctcatctctgtcttgctagcatagctctctaagcctagagtagtaagagcacattcatcagctgtgtgaagttgtggaaacattcagccactttaaatgatgccctagcggacagtatttgctttgtctgcctcacagtgttattgtccaagagaaactttgtaaattacaaataaatgtgaggtagcttttccttgtaccatatcatcctgttgcactctgttgaagtcactccagaaaagaactttaaattggacattaataatgttaagcagaaaacttcccttttataaaggatatagagtaaaaatgtagatctcttccaacaatgctgcatttgttaccatttaggattttttgtgatgtgcctagaagggcttatgtaatttgcataattaatttagttcactaaaagctaatttgtatgatttggctttgacttttcattgccttcctcacacattgctttcacttagtctaaatgcaatcaacaggtacttctgagtaccattgtaagcacaaaggcacttaggtacacacacaaaaaggcaccgaacatgtaccttactcccaagaaccttaccaaaaaaaatctggttttcaaaaaaaaaaaaaagaaaaagatataaatacaggatccctgctccaaggcaaaaaaaaaaaaaaggaggaaaagatatgtttgaagaaaaaggagaaagggaatgaatggagaaaaggaggaagaaaagaagggaaggaggaaagaaggaactaaggagtgaaggaatggaggaaaagaagagaaaaaagatagaaaagtaacatgtaactgttcaaaaagagaaagagttttcataggataatgtatattatcgggtaaattaaatggaaatacttcttacagccattcagaggaacaagctgctgttccaccatggtcagatgagggcagttttgaaaaggacattaagtgatatgcatgatttgtatagggaatagaagaagactgaaggtatactaggcctatgaaaaaataacatcaaatagaaagtatgcatatttccaaacctcaaattcccagggatatcagaccacaggaaatattagttgtaggaaaaacatatctcttctatctattgcccatactgcaccaggctcaactagtgactgtttaggtatagagtttctagggcagtatttattccccatttcatccaacaattattggaaactgatgttttcattaaagaaacacaatttagcactagcaatccgtttagttttagcagtcagaaagttacttttaaggcaaattctgtgtaggatcattttcagtagtgtctaagatgccaacttattgtgaaatcactacttactttaaaaatataagttagaagttttgatggtactaaaatatttttcctccatgttcttaatctcttccacatattgggcagatataatcaaagcatgacactagactttaagtttttttgtctgtcaacatattagaggtgattgaattatatctattacaaagtgccattttattatatgtgatttattttagctgaccaacagctaaacaagctgcactccaaatgaaagattaacattaggattcttttctttaccttcagtgaaacaagcttctggttcaagagtttcttcaggttccactacgggctgttcttctacaggtgcgccgatgtccacagtgctaccttctgatgagctactgctttcattcagtttctgtaagtgagatggacatagaaagtaaagtcctttaattttggtaataagttgcctgccaagaaaggattattactatgaatttgttttttattcttcttgaggtagagatatttttagagaaaaagagagattgaataaggggaagaaataagaaaatcattgtctgtgctaacccttttaccataattcacaatgtaagcttgaaatcagattgctatgttatgaggttacaaaaggccatcagccacatgtactgagcaaaacactgccttgtggattagagaagcaggggacacagggaagagaagagggaggaagagaaagggaaaaggagcaggagagaaagagaaagcttaccttagaagaaaataatgtcgttaggttattctgcagtttaatgtttgactttacatatttctttaacaatgtcttacctgtgtgtacagatactacctgttgttttcacttatgttactaagattcatggttaaggtgttcagagttatttactataaatgtggtcatttggagagaaattgttataaaatatgtcaaaaattacatcaataaacaaccttagagatattaaatagacatcttcaatttctggcaagtattttagagcctgaagtgttgtaaaatgagataaatagtgtgtgggaaaattcagtttcctctgacaaatcatgtttatgttaatgtgccatgtgaagctgaaagaacaaaatctagttaaacaacaacaacaataacaatatccttcatattttgacaatagtgatgggatgcacatttctctttctagagttctcagaagacaaagatggcagagataatagaaaatattaactaacatattaagataggaaaaactcatgacgctctttctgaagaccagcaaactggcttataagtttttggcaagtgtaattaattcattaatttattcaactaatattttttgaacaccaacaatatgctaccagctgagtattcactgataactgaaatatctattgtccttattggagtatcaaatctagtacagtattttctaaacttcaggcttatgtagacccgacaataggcattccagtgcacacagcagcaagccattcaacccgttatcacgatattgtaaatagtaaaaattaaacacaatattaaaattgttaatatgaatttcacatacataggagagtgttgatatttcagtaaaagtttcaccgaaatatttgtatttgcttgaagaaggatagcttatatgtctgggtccatatctagttgccttctttcctttccttttaatttcttaaaatagaaaaacttacctgacagttacagaaaattaggacctataatggcatgtagctctgtcatagctctgtgaattcaggttgaagatgatctttgaaattataaaatatttctcactgaagactaatttcaacattctaacacattaaataggcctgcatactatgctcagaagctgaaaagttgattgttcaacatgatagacagtagtaaatagatcataatctactttcgggttgcatttagctttgactatctttgtgttctgttctagcatttgcactgaatttaaaacatatccaggaataagtcattggtttcttcctctgacaaacgaagagaatcacctagtggcaggcgttagtcacattctcaatcaaactactcataacatcacatgatcttctgaagaaattcttatgtcttatcctcaacattacacagattcatcatttggccgtaaagtgataggctaagacttgtcacttcaacaagtgccttcatattttaaaaatgaccttgattggcactatccgggacataatgaaattcattacatactttataaaaaccatgtgagcaacatttcatcacccattgttcttcactgtagaaaagcaaatgcccattcttcatgaaacaattagagagtggaatttgagaattttaacaattttcgccaaaattaattaagaactagaaaggatattatttcctgtgaataaatttgtgtggagaggcattcaggtacaaagaattataatagcaaacctaccttctatatatataattgttatctgctaggtctgatccccacatagttttccagtctataccaagactcacaaaataatagaatattagcataaaaatctactcttcatcagtataggttgtcagtaataagcagaacaaaaagttgctcagtaattaatcttcatgtaagtgccacagataaatgattgattctttgcacataagtgttttatccaattgtaaggtgaattagatcctggcatgaacatgtacataaaaattgttcttccttgattactagtaatatcatgcaattgttattgcatgatattaaagtatactgatacactgataataaagtattgccaataactagttttgcttttttgccaaccatatttgttttcttatgaggaatactacttttaatgatacctctgaagcattgatttttattctgcctttaagtgaaaccacttattcactttatgaattaaagcattgttttttactttttctaagacaaagacttatctgacttacctaagttgtgactattttctgtgaaaattacgagaacccaaaagaccttatgttactttttgacacattttcaaaatggcattctctgaagaagacaaatagatcaacagttcaataagttttaatattcagatattcatcttatatttcttatttagacatttatttttaggatgcttacctaagatggtcactcttacagaattactttttaaaaatacatgtagatttatggttcttctgatgttttttcattagagtctcaattcacaaaaaaacctgagttttaagtttatatgatttccattcctattttatccctttgagttactcaaccaagatagtgtaatgatgatgtaacacaatatgagaataacatcaaaatggaaaattgaacaatataagagttggcatgcaattggacatacacgaactctaccctgtctactaaatgttaggaaagtaaaacttactactaattttaagtacatgagcaagcgcttgtaagtacccatattacattggtaactcttgaagaatgtagtggatattaataacataagattgtatgaactgtatgattgtatgaacattacaagataatatgaactctaaattatcttatatttaaaatatgttaaatgtttctgaataactttgctatttcatgaggactactttataaacaaactgggaccatgggtgggctgtagatccaggaattggtgaatagtgttacttctccaaattgtaaaacattaatggcaaagccaaagatagtcacaatggatggatacaatatacttctaagtgtgctttctttttttaatgcatagagcttggagtcactccatatttcagaaattttaaggtgatttaaaagatgatcaaatgcccttattagcattccaatggaatatctgcacttggaaagttcgcaggtctagacaagtgatcttctacatgtttacaaattaattttaaaacattttttaagcaatataagtatattctacagtctgtctgaactactgtaggaaagtggaggtgtgcctaataatactcaaatttagtatgctctcaatctaagtaatgactttttaaacaatcttaaacatacttctttaaccaaattcctgattctgcaatatcactctttcagcacccagactcaaatttttttgtttacttttacttatttcaaacattggcagtaatcaaaagtcagttttccttattttatctctgaaataactattttctcagtcagattccaaattcctatgaaatttctgtttattcttgttaccttttctttgtttaactataaataaaaatggccatcctcattctagcctcatgtgacttagacctttgtggtccacaaagcttagtgtatgtatggtgaatgactaacaaacatttggtgaatgaatgaatagatgaatacctctgtttcagatattagtgatggatgaagtttttgttttcaacttagagttccaaccaaatctcccaaatttgtctttcacagatagaagctgtatgttaatcaaggtgaacttcttttttttttttttttgagacagagtctcgctctgtcgtccacgctggagtgcagtggcgcgatctcggctcactgcaagctccgcctcccaggctcatgccattctcctgcctcagcctcccaagtagctgggactacaggcgcccgccaccatgcccggctaattttttgtatttttagtagagacagggtttcaccatgttagccaggagggtctcgatctcctgatcttgtgatccacccgtctcggcctcccaaagtgctgggattacaggcgtgatccaccacgcccggcccaaggtgaacttcttaatgttctctgactttttctcctagtgatttttcctcccatcattgcggaagagtaataattgctctcttatttaaacccctttcaacactttacagggactactttgggcatatattttattataacttctcttcattctaatggacttacttacaaaattaatgacacttgcagttttctcagtaaaatacaataactgatgaccttgatgtgcaaaaattgctcaggtcgttggctactgcctaggatatctgcacatttctattttcaccagctgaatggtatgcttatcaagaataagttatgtttattttcaaatcaatttacactattctaaaatactgtaagtgtgtaatttaatcttgtagaatttgaaaaatgcatttaaaaagtgttgttgtatttataaaaactaagtcaaaatcattgaataaacgtaacaccggtaaatcccccacatagatacatgtacattaaaaaaccataaaattaggtgtgaatatttactttttaaatagttacaaatataaatttctgagaagatactaaattcaggttgctttatatgattcgttaagatatttgtcctctgggggaaaaaaaaaactaaacagaaataatagatgatgaattacaagtgcagctcatgctaaaacattgatgtagcactccaaacaatgaacccatgctggaacaaggcacctaaagtgacatttttatacatgtcatttttattttgtaaataaatggagcagttgaatgtttgggatccagagaagtgtatacatctttcaggaacaatatatgattaaaaattagatttaaaaaatggtattcatatttggcttaagctctacttcgcaagtcagcattttgcaaagggaggctggtaagccacatcatggctaacccttatgatagaccctgattctcataatagtaagaagaattttcccctactttcaaatcataataacatcagaaaaagtgacatgtgactattagaaagattaaaccataagcagtggggcttatgtcaatgaattactctagataaactatgataacctgagagaagtgttagtgctttttctagaaatttatatataatgtaaataaatgagcattagtgtaagaaaggaaagaaaaacaaacaaaataaaataagttcacaagtgaccgaactaaactgtttttagccaaaacatggggaacaacaagagttttgattggcatgttaaataaggaatacaatacagaaattaaaattaaattaaacaaatagtaaaccttttacatagtcaatagattaaaataaataaaaacattaatataaaagtcacccagaccttctcaaagatgatagtaagtttataaaaacaagaaaggcattaagcttaaacacataatttgtataaattatttctaaaatgctatatgcttagtctttaatgtactttagaacttagagaaagtctatcatctgcagatcataagttgtacagctaaatttcaatcaacaattataccaacattcagtatgtatgttgcaatgaaaggcatctgtcctactaatatgacagaagaggtgtttccagccaatgttctccagagatctcactccagccttaagtggctgaaggctttaattcaagcagggaagttccactttcatctaatttatgcatgatacatgaaaaaatttgattaaaatattatttaaaagattggaaaactccctatagtcccagctacttgagaagctgaggcaggagaattgcttgaacttataagtttgggaacaatttcagcattatagctggatcccatttctaaaataaataaatacataaatgaaaatttaaaaaattttgaaaatgtattggaaaaccataattgaatcaaaatttggggaaatgcatgcccaaatttaagaagatgatgttaaatgaaagaaaaaatatgtgtggtgaatataggggaaattatgtggaatttagtatcatgaatttcagtggaaaaaaggtgataaaatgaaaaaaatcttcaagatttagcaatttcagatgaaacaacttggcactaagctaatgcaaagagctattattttaaaaaggctcttaaagtttagaatttgtcaccaacaccactagtaactaggtggggggcggggtaataccaagtgaagagacagtatctttgtgggtattaaaaaagttatttcaggggtttaatctataaacttgaagaattgacagtatgttgaatgacatgtaagaatctcttctttatgtctgcaaacatgctttcttcatgacagtctgtagtaagcagaattctaagatggtctccaaaatttctggccactgttgtcatgcccttgtataatcccctgcccttatgtatgggcaggacctgtgacttgcttctaaccaatacaatgtggcaaaagtaatgggatgtcactctggtgatcatgtcacaccgaatcattttagaaaagttacaatgttttcttttttcttcaagaaataaataattagtagttctgactttttaatgttaagtaccaacaaccaggcttacagaagcagcaaaatgtgaaagctttgctacgtgaaaacatatactaccaatcaggtaaacttgacaaattatactcaggttttttactagaagctgagaggagttggaattgaacatgacctcagaaaactgcaatattcagattggtaaagtagacctggatagtataattgatttggcaaaaagcacacaataggttaaaaaaaaacaaactaggatgcaaaattctcaactttaaagctctttttaaattcaacatggtgcctctatgaatattttatagctatacctcattacaataagtatgcatattggtcattttatttgcatatatgcagaatatgtgtatacattatcatgtggtaaaatgatccatatatggagtaagtagatgatgtaaattactttatacagccaaaccacatctgtcactcaccatttctgaattgactattccaagaacttttaaaacaagttatggcctccagtggagccaacaaccttattttttcacccttctcctggcccaggccacagtagtggaaagaaagccaccaacaataaactggaaagaaacccagacctggtttgacctcttactttctgcgtggctttgctcaaataattcttcctttagcccattttttaaatatgtaaaatgaagagatgatctttaaagttccagctttaattttctatgactttgtagtgtttgagaatttgaaatgatacatttggacagtcttaaatccaagagagatatgaagtgaggactgatgagaaggtgatgagggagcagatctggactcaggaggagaaaaggatgaggaagttcagagtgggtatggctgctgggcctgcacagtctgggtaacatgttgggactgtggctaaaaaagtcctgtgatcagtctggtcaacatagtgagatcctgctgtccctactaaaaaaaagaaaaaaaaatgatgtttttttttttgatacggagtttcgctcttgttgcccaggctggagtgcaatggcgcaatctcggctcactgtgacctctgcctcccgggctcaagcgattcccctgcctcagcctcccaagtagctgggattacaggcacctgccaccatgcctggctaattatttatatttttagtagagacagggtttcaccatgttggccaggctggtcttgaactcctgacctcaggtgatccacctacctcagcctcccaaagtgctgggattacagtgtgagacaccgcgcctggccaaaaatttttttaaatagctggatgtggtggtgcatgctactttggaggctgaggtgggaggacggcttgagcccaggaggttgaggctgcagtgagctgtggttgcgccactgcactctggcgtggatgaccgagtgaggccctgtctcaaaaaacaaacaaacaaacaaacaaataaataaatgaaaaatcctgtgatcatctctgaccaaggagaagcaaatagctattcccaccttagagacaaagaaaccatccacatgtagctgggcttttaatttcactattagctgtatatgaaatattcaattactcaacatttattgaaagataccatgttctgagatttgtgttaagtatctgtctcatggatctccttcatcagcataatgcattatttacctgggtttttgttttgttttccttttcatgttttgcttttgtttcttcttttttattggccaaattgaaaagcagaaattacactaccattgttttgatattaacttatttgataacaattaggagtaatatttcttaaggtttgtcttccagttatattttttatgacttgtctcttttgactattatttgtttgtttatttgagacaggtctcattctgtcacccaggctggagtgcagtgatgaagtcacagctcactgcagcctctacctcccaggttcaagcaattctgcctcagcctcccaagtaactgggactacaggtgcatgccaccacacccggctaatttttgtattttttgtagagacagcatctgatcctcaggctggtcttgaactccggagctcaagcaattcacccaccttggcctcccaaagtgctgtgactacaggagtgagccacggtgcttggtcttttgcctatttttctattggagtattagtgttcttatttgattgcaattgctctttacacatagaaaatcatttgagttttcctaacaaggattatttgccaaatgtatttgttttctgtgtctgtgtaacaaatgagcatacacccagcatcttaacatacattcaccaactcacagtttctgtaggtcggaagtctggcactgcctagttggattctctgctcagggtctcattgagatgatgtcaaggtgttggctggaaatccagttcttttccagggctcaggatcttcttccaagtttactgtcgttggcagagttcatttctcataattataagactgggcttcctactttcctgccagctcatggcccagaaccactctcagcaactagaggccacccatagtctctggccacatggctgctgtatgcaatttacaatatgggtgtttgcttttttctaggccaggcagagcatatcttttcagcttcctctatgtgatagcaggagaaatcactgtgcatttaaagagtttgcctgattaggtcaggcccacccagcatcatccccctttttgtcataaatgtaatgtaattaaagggtgataccatatccacaggttccaaccacactcatggagtggggattatacaagggcaagtgtcattgagatcatcttagaattctgcctgatacaccaaagtttgtgtgtcttactgatttttttttcctaagaaccataacctgttataccaatattgtctgctacattgataattcactattttttctctttatgtatatcttcttccttttttgttccttttctaatttctcaaagatatttgttaggttctttcatcccttcttaatcatattagtaatattaagtcatattaatgactacttggtcttcttccacaaattttgacataaaatgcttttatttttgaaatagctattttggtattttattatgcttttattcaatatttgtttaggaggcaatttcttaattttcaaatggttggaattctttctatcaatttattattaatttcaggcttaactacattgtgactggataaccctatatgccagctattttaaatttattgagctttactttgaactccagtatatggttacttttatagaaatattccatgaacccttgaaaataaaaattttctgtaaatatgttttttgagataatatacagtcatatttacttttgctattaatattatccaaaatctaaatgttgtcatctattttttaaaatattttaccataggctaaaaaagttgtattaaaaccttcataaccagtatatttgcatcaatatattcttataacggttgagataaaagatgaagtggtccaattctttatttgattgggataataacactattattattaaatactcaaaaagggaaggaaaagctcctcttcagatgtgtaggaaaagtccacctctatgttagcacatgaaatacgaattcatataaaattctaaagaaattcaataacggcaaaactaaaatattctcaaataagtatttttacagatttaaaaatcagtaaggccaattaatttttccttttttgttcttagattgaaatttaatttcattttgaaatttgctattcactaataaagtaatttgttctcactgttttagagattaatggaatatttctctttctttctttcttttttttttttttttttttttgagactgagtcttgctctgtcgctcaggctggagtgcagtggcgtgatctcggctcactgcaagctccgcctcccaggttcatgtcattctcctgtctcagcctcccaagtagctgggactacaggtgcccaccactgcacccggctaattttttgtatttttagtagagatggggtttcaccgtgttagccagggtggtctcgatctcctgacctcgtgattcgcccgcctcggcctcccggaatatttcttaaaatctattttaatgtttattaaaccatgaatcaaccttaaattttaccaatttctaaataggctagtttatttaagaatatgtatattttcacacatgaatcttaatagctaaattatacacttatacactgacttgtatcatccatgtatttttggcaggctgacttaatatgtgagctgacagaatgcagagaccacgttgtatatgaagcatccactttgccttgtacaccagggcattcaataaccacttaataactacaaccctgatggtaagagcagttttcctccgcagtggatttatgcaaatttcttgttttttaacaatgctctttactatagcaaatgattttgaccttgagggtaaggcaaaacaaagcaaggcaaagaaaactttcttcaatattctctgagagtaagtgattaaatgctttttttcttgttctctgacttgatcctacaatgtttatatttttatttttaaacttggtttgttataaggagcttatttatagagtttagtaggagttcaaattataataagtaatataaataaatctggaatttaagggtcaaaagcatacttaatatgtggtcatgcgatgtctatatatttgtatatgtatatatgtgtgtacatatatatttaatatatatatttaacatacacatgtatatatttaacatataaagaatattatccaaagtacttatttttaaagctggacaggtactattttaatgctgggtactttactattgtgacacatatatctcctaagtcatgctaaaatgaggttctctacaacctcagaaatgctagtattaatatttcattgtgtacattgtgcactagtaaatatttctattgtacactatgcatattaaaaattaaaatgacccctattaaagactctcaacaaaggaaaatataatatcaatggaaaagacactgtaatgagactcaacatttccacagggcagctagaaaactcaaatattaactcattaattcccacattattcccagttgatttcttcatcaagctgtatgttgaaaggacaatcttcagtgattattcatatttacagaatgtcagttgtttctattctttagtcaaacacttgcccagtataaaagtgaacgtggaggaatacggctctaatatactactctgaattttgctttcgataggtcacacataaacttctgtatcaataattaaatataagggaacaaaagcaacatatttcagacatattgagtcaatagaaaatcatggtaatacaaaaaaattggaaagaaaacaaaaaaattctgaaaaattgcatttataatccccaagctagaaaccaaaatgcaaatcaaatgagtaattttcattgttaaattcattttgccaaattgagcacagagcttctataatgttattttgacattgatttttaatgttaaattataacatacttaataagtgtctactgggcaaataaactgtatatctatataatgaaagagttgaaagtactactgttcagaggatcagagaaacttgagtttgaatcacaatcactggttttatggactttaaccaattattctgacctccttaggctttaggtttctaatttgtaaaatggttcttacttcacatccttgttataaggactgaacaagataacacatgaataacgtttggcgtatgcttatttgataaatggtaacaatttccatcacagtattgtattgtttgtaataggtgtaattattgatatttgaactttttcactaccaaaaatgtgccaggcatcaaaactaggacttgaaaaataaaatagtgaacataatagacttagtatctgccctcgtcggttcacaatcagatggaggatacagagaagcaattgccacacactctaataggagtagtatagagtatattgagaacaccacctagctcaatctaggaaggacagggtagaataaagtgacatttgggacaagaaggatgtggtgggtgaggatgagtcaggtgaagcaggatagagtaagagagtattcctgtcagagagaaaaggtataacgatgagaactgataaagcatagggaattacattgaatgaaagattagtatagctgggtggggaggtgtgaggtgtactattccatgatactgaaggagtcagcggtggtcagttttgcagggacttgtacccatgttaagtagtatagactccatactgtgagcaatgggcaactcctgaaaggttagggaggacagaacggttacgggatttgcattttagaaagaccacctattgttttgtcaagactacactagcgagaggagacccgtttggaggctgtagcagtaaaactggaagatgatggaggtctgacactgggtaaaggccttgggaatgcagagaggtggacaaagataggtagctttggcagtccctagtgatcaattagaagtagtggagatagtactcttgggttccatggatagtactcttcgcagagagtagttgccatctcttagagactatgtgcttaggttggagattgtcgtatgttccttaacccatataacgtaagataaaagtattagatggaaaaatatcagcaaagcaacaagtagatttaaaatgcatatatatcagtgatataattgggaaaaaatggaaatctagaagtaactgcccatcacctatttattcattcatttaataaatatgttgtatgtgctgtggacttaagggaagacagggttagtgtttttcctgttctcaaagacctcataagctaatgatacatcatagaagttcttcctaatgatttggaagactcttccagcagctttaaactcagaaggggatgctccttaagcacaactatcacactctgggagactaagtgctctctaagtagaattagaccaccacaggtcagtgtgggatgcagaagcagatcagcctaaagtgcaggccagtaccagaggaacaggacctttcaggactaagcaggaggactctgaaacactccagactatgctgttaacctatgcccaatgtgcagtgattggaagttaacaccaaatctatagttgacacctgtacctagttcttcaacaaatagtattatttatttcagaactatgccaaagaaagtacattttcagacactattaagatttagtgtagcggttaagagcgtgactctggagcagactatggagcagactgccaggaccaaccacttactgtttgtgtaactttggcaagttttcctttgttcaaaatatgtttatttttctcatcttaaggctggaataacagtgtgtcttacggcataaagactgaatgggacaatatatgccctccaatagtactttgtccatggtgaacatttaaacaatagctgttattaacataacctgaattactaaggacctcacatttttactcattattctagagctcactcatcgcaaaaacaaatgtatttcttttataattactttagtaatgtgccttttttgttcccaaaaggtacaactttaataactcaatttatttaaaatttttatttaaatggaattaagtagtaattttcttgacatcaccttacacttttgaacatttttaacttccaaatagcttttagatcttcataacatttctataagcatcataggacagatatctcatttaataaattaggaaacggggtaatatagatttagcgatttgctcatagtagagttaaggcttataagctcttaatctagtatccatataaatcaaccaaacctcaaaaaattattgggcaactgttatgcacccagcattgtggtaggtgcttcggaggatagaaatgttataaaatactatccaaaaccaaaataaatttactttctatttggggagataagattttatattgtcttttgcatagtcttggcagttttgcccagccttcaaagctctctcagatctgtccaagtcaccattctttattattaatgttcaataaaaattcatgtttctagcttatcattattcctactatggcatgagtcaagaaattttctgaggttttaaaaaacaattcctcaaattacttgaatgtactttgaaggttgaagtctcttaggacttaaagagaggatgaaatgtgactcatgctattccctttcttcttttggagaccaataggaggaaggtgtagaaaaaacagcccttagtttgctctggaatggaggatagttaggtgtgagttcaccacagatgtaagaggcaaaataaatatgaggttccagttcaccacatctcttcataccagtctattcttgcttcctggaaaccaagactctttacctacatctcatcctcagctcctgtgatttacgcccccggaattccaaactactaattgtctccaaatacatcctcttgcttcctgtctttaggtttctgcatgtttgtatttcctgattggaatgccccttagaaaagtaattttcttaaatattttaaggagcttaccatatcaagaatgtaatcaaaacaatttaaaaataaacagaaaatataaaatgtatcaccatccccagataaacttataaaacaatttattacagagggcaaaaggcaaacaacaaaaaaagacaaatagtggagtatgttaccagtagtaattcttgtaagaaaacttactggaacagtgtggaatgcaactggtaacaataataatgatgatttaccagatattctatattaattaggcactgtgctaagtacttcacatttattatctcatttaatactctgtcccagaaatgcagtcagtaacattatgcacatttttgagatgaggaaactgattattagataggtaaagtcacacagtaagcggctaaaatgaaattatataacccagtatctggctccagagtataaccatttaccaactttataactgtggcctcacatgtctaaaaacaaatatttagtgtatgaagaataaacagtgggcacttgtaattttaacacaaggcattaatataattttggaggtattataatgatgcattgtagataagtcattactggaattcaggaatggaaacaataacatgttcaaatgaaactagtctaatagaggccatgaaaggtaacatttttgcatcagtaacatatgtctcaatatgaaaattcatacttaaaggttgaaagtcatacacacacacacacacacacacacacacacacagagacagagagagaaaatcattccttatagcttattagtatactcctttatctagtctccctggcatatgataactgataaataaatgaaaataggcaaaaagaataaaggctaaaacaaaaagaaccaaaatgatgagattaatatactacaggcagcattcctaatgtagaacaaagactcttcatctattggggcatctgctgtcagcttaattcctctaaaagcagaatatctcataatttatgccttactttgatgaacagaatacagtataagactgatgaagcaatgagggcaaacaatattgtgtgggtttatttctgaccaagaagaaaggaattgtgaagtaaaagtgccaggaaatttgatacaatgtggtaatctgtgaaagaatataaaaagaaagccagattcaaaaatgaataaaagaaattgaaatgtatcattaggggataaatagaagtttcagtatttaattacaaaatttcgtctggatgagatacaactgcatttcaacagcaattcatgtggaaaagatgagagattattactttcttagaagggtggtgtaaagtgacaaggtaacatggctaacaaaaacaaaaacaacaaaatctaactcaagtgaatcttgaatctagagaaaaaattggtccaaaataattggaattaaaatgacaatctcaagtatgctctaatcagagaaagtatttatgagagcccttcagaatggttttattaagaagagttgaatgagctggaaaagtttgatctgagtgtctactttgtaccaaacatgtttaagtaggtcaccacataaaaggagagacatgcatgcatataagtagctaccctaaaatatgatagtactttgtaagacgcatgagtcaagaagatgcattatttattactatactctatgccttatatctctgggaaccaaaaaagaaagcaatctgttctgcctagggttaggaaggcttcattatcactaccttcaaaaagctgaaacagtctttctgaagcttaagaactcctggacttcagacactatgcccatgaaccaagtggttgcattctaattagacaaacaaaacattaaagttcagcacaggtggcaaaagcttcatttaccaggacttctccctctgacatgaaatgtgctctaacgttattctgttctatttcattggccgggtgcagtagctcacacctgtaatcccagcactttgggaggctgaggtgggcggatcactatttcattaaaattaaaaaaaaaaactggcctattaaagggatttctcaagtctaactaaactatgactcacaatttgagaagcaccacattaaattatctctaaagtttctattaccttaacatttaaaatttcaattaatgcaatgttccaagatataaaataccacaaagtagaaagaaacagaactacctctagtgcttcagtggatagttgctttataaaaaggttagtgtttcttttagccttgatcaatataaaaaaacaataagagtaagaatcatgtcaaatttttacagaaaatgtatatcttatggatggtctttgtaaaatagtctttttcctttttaatataacagatagcatatggtagccattagtcctcatcaaatgctaaatgtaggtctaaagattcaagacaaaggaagctagactaggctattactaaatttattttaacagaagttcagaaacaattttataaagacaacaatttttcaaaaaattagccttcatctgattccttaggaaaactcaaataaacaaagtctgaactgacataatatccaaattaaaatttctgtaaaaaagtccacaatatttgataaaaacagtctattttttttttgtcctgaatctatttccatagacatggaaatgtgacaggatctatctactattacatctctgcactatatttctttcccttctctcatcaaacaaatctgaattaactaagcagctctaatgctagggtcagggcagctgcttccagctccaatattagccccctactcctaaaagtggaggctgacctagattattcagagactcattataaatacttgaagcatcttttaagggatatagtcactaaatcaaaagaatgtcacatacctgtggtatcttccatggacaactatcaaaatgcaatggacatgatgatatctaatagaattgtatctctaataaaatgtctttaatgtattcaatcctttaaaatatttagactatacagcctaaaagatgggcaccctgctgtttttgagatttccaaacactaaatgggaagtaaaggtgctttgtcctagactccttgttaattatcttatatatccattagacttttaacttaatatttcaaagtaggttgctatggattaaagttttgtctccacaaaattcatatgctgaagctctaaccttcaatatgactgtatttggggatagggcctgtaaggtggtgataaaggttaaatgaggtcatacaggttggactttattctgatagggctggtgcacttataagaagaagaatagacaccagagttctctctctttccatgtacatgcattgaggacaggccatgtgaggacgcagcaaggaggtggctgtctgcaacccaaggagtgagccctcactagacattgatgctgctggtatcttgatcttggactttccagtttctggactatgagaaaataaattttggttgtttaagccacccagttatggtatagtgttatggcagtccaaacaggctaatgcatagggcagtgtaattttagttgaaggagctacaagaatatttcttgttgttaagttctcttcaatgtacatgagccaatgtgatgcaaaaaacaataaacagaacttgtaaacaagggctctaagttcaactctcggcactcccctcactagctatgtgacctaatgctccctaagctaattttcttatctgaaaagttaacataataacacatttctttccaggttattgtaaggattaaatctgatgatgtttgtctatttgttagatcgttcattcattcatctaacaaatatccattactaaggatgagaaaactcacacgtatactatattaccctttaatttatcagtcatttccgagttaaatcttttgttcctcagtgaaataaaattttacatgatgtcaaaaaaatctatatggaaaatatataataataaatacaggcaatataatgcatgtattgtaaatgttcctcaatttacaatgaggttagttcctgataaactcattgtgagttgaaaatattgtacatcaaaacttacttaatacacctaactaccaaactttatagcttaccctagtctactttaaacatgctcaggaaatgtagattagcctacagttgggcaaaatcatctaaaggaaagcatgatttataataaactgttggataactcaggtaatttcctgaatacagtacactgtacggtaaatattggttgtttatccttgtaatcacgtggttgactgggagctgcagcttgctgcccctgcccagcatgagagtatattgtaccacaaattgctagcctgggaaaagatcaaaattcaaaatttagagcatggtttctagtgaatggctattgcttttgtattatcataaagtaaaaaaaaaaaaaaatcttaagtcaaaacatcattaagctgaggatcatctgtatgtgtgtatatgtatatatgtatatgtattcataccttcccacacctatagaatcttacctctttgctttcttccagatccgattcactactaaagtcttccgtgtttaaattttcaaagtcagattctcctacagcaattggtacagtcacagtaagactggggttgtttatgaatgacatgtaatcactttcatcaataatgtatttttcaacactgctgccagttcctataccacttgtagttccatttacatctttaagatagtcaagatctttcccaatttctgctgtatgattggacatacaactgtctttcttgttgtttagatcatcaagtggtttaatttcatctaaaatcttttgtttcctaatgaaggactgttgaataaattcatatatttttcttttcacataagctactcctttgtgcatcctatccacagcaatttggagattattcatttcattatcatcatcagtggctgcaaggttgtctgcactaaatgagctcagaagcaaggccagaaagagattcaggaccttaaaaacaacaaaaacatgattataattttacaccaatgtagggaagagcagattacaatcacttattctttcttttaagtgtggaaaaaactctaagttctaaaacttgatgagaaggaaacaccacagcatagtgattagaagatgggtgatctgaatttgtgactggctcaatagcacatccttggacaaagacatgatttctgttgctctcaagttctcccattcgtaaagtgaaattgaatgagctaatctaaggttttgttaactctaaaattgtatgagtagaagaaaacagatttatatgtgtacaatacgagaattcttaaaaatcactaatgtttccaagtatgcatttaaatgcattctataatttttcaataaacaaagatattaaattggatgtcaattgaaaaataaccattacaactcagaatgaagattaggagcttaacataggctgacacttgttttcttaatctattatatttctcatacttcattgttgactaagtagagctgtttatgaataatctctcatatttccatgagactggcacatgaatgtacatacctttagaatattttatgtattactatactataaacagtaacactccaaatttaagagagataaagattgatcagttactccattatggtaatctcaggcatcattagccattcgagaactgatgaactcaggttggctagtgcatctgccatatgacatagagtgattgaatatcatatgctgcaatggggcaaagaaatggcacaagcattatgaactcttaaagacaccactttttagtcctagtctggatggtaattttgcactttctctctactttttttagacttctctcttccttggctctgaatttataaaatggtcccagcacatccttttaggctcatctcaatatgatactctattgtaattcacataaaaaatgtgataaagtgactgacaaaatagaatttggtataaaaaatgcaggggcactgctatattgctgtgttgttaaagtgataatatatccaaggtaatggacttttaaaccaataatcatagtttgtttttctttttgacaaaacagtcaccattaaattatactctttttttttattatactttaagttttagggtacatgtgcacaatgtgcaggttagttacatatgtatacatgtgccatgctggtgtatttccaaaatgcatatcttaagtgggtacataccactaggtttccaatcaccatgaccatcatgaagacagtaaggcacatggcttgaccagcaacctccatacagtcccacatggtctctatccactccccacacagcacgcggaacacaatcaggaaggagtggaagaagtcattcatgtgccagcgtgggagttgacaatcactggcgatcttgcagacacaatctttgtagcttttaccaaagagctgcatgccgaccacggcaaaaatgaagacgatgatggccaagacgagggttaaatttcccagagcccccacggaattgccgatgatctttattagcatatttaacgttggccaagattttgccaacttgaaaactcgcagctggaaaatgaaagattaatatatatttgtatgattcttaaaagcattatatatattgagctttacctagaaatggtcattagaattcaatatcttacaatatctgatctgccctaaccgtctcaggctcatggctaatttttggactccctaggaaaagctggattttccatattttaaccatgtagatcattttctctgatggtgaattatttttctttccttttctttttttttttcttttgtcacccaggcgggagtgcagaggagtgatctcggctcactgcaacctctgcctcccaggttaaagtgatcctcctgccccagcctcccaagtagctgggactacaggcacgtgccaccacacctggttaaatatatatatagtagagacggagtttcaccatgttggccaggctggtcacgaactcctgacctcaagtgatccaactgcctcagtctcccaaagtgctaggattacaggcatgagccaccaagccaggcctcttatagtgaatttttaatgagtacttggaatccaactgttcttaatttgttttataaaggtggttctaaggccggatattataatattaacatctgaatctgaaatatctctgctgaaagatattaatttgccagtagtgtgcaaagtaacatcatactgagccctgatataagtaaagtgttcattattcattaatgctccttaggggtattcatgtagttacatccacctgcattgaaaaacttggaatatttcctataattctacaattattttcctgacttgtaaggatatatgtgtgaattaatgggcatgcttagtaatcctacagactttctctcctttgactttcgcaagatgcatattttccagagacagaattagaaaaagtttctgcatgcacatcttacatctgattttcatccactgctacaaagggctatatatattttcaagttactattaaaaggtgatgcattttcattaaaaatattttcttaggtctagaaatattaactgtagtagtctctagaagcaatacttagtgaaaatagcaactgagtaatacgttaacttttacgtaactatgttctttgaaataaaggttttcataaataattgagaatttttttccatgtaggaaaagtttttgacaatgcaaatgttacagaaaaacttacaatgctaatggttgtgtggcaaaaaaactatgacattgctatgcaagaaccctgattgttagaaaggtttttgaatttggtgctttttttttttttttttaccaatcgaaatgaacggagaacagataatccttccacattggcgagtccaagttctaccaggctaagcgtcacaataaaaccgtcaaagatattccagccttcttggaaataatagtaaggatccatggcaataattttcagaaacatttctgctgtaaagatcccagtgaaaacctaagatcaaaacaaaattaatctaattccaccagataataacatacatgacataagatttgctcttagaacataatgcttatgctattttcccacaatgattctattactaacttaaatttgtatggcaatttgtagttgatgaaagactttcatatacattatttaattttatccttgtggaaacgcgaagtagataatatacaattattactttacagataaggaaactgaggtcttcagatgggtgaaatggcttgcttgatatcatacagcaagaaaatggcaaaactaggatttgagtacaagtcatcttttttttttttttttttttttttttttttttgagacggagtgtcagtctgtcgcccaggctggagtgtagtggtgccatcttggctcactgcaagctcctgggttcacgccattctcctgcctcagcctcccgagtagctgggactacaggcgcccgccaccacgcccgcctaattttttgtatttttagtagagacggggtttcaccatgttaggcaggatggtctcgatctcctgacctcgtgatccgtccgcctcggcctcccaaagtgctgggattacaggcgtgagccactgcgcccagcccaagtcatctatttttaacagtgctctttccattataccaaactacctttttgtccagactttatataccacaagtactgacaacattttgcccatgagcacttttatttatctataagcttattcctatttccctcaatcagagttatacattcttatctattatactaggtgcattactattgtcattctttgttatgcacatgaaaaaaataaatttacttctgtagtataaatagtagaacttcaaaaatataactaataaaatgcaggttgttatgcatgatgcttttgttttctaccatcaaaaatcctaaacttcaaaccaaatattacaggaaatgcataaattactttagatagctctttccttcagcaaataaaagctagtattcctaagttgagttgactggcaaacactttaataatttatgtttttgaagcacaaaaaggaaaaattaagtggcaatcttcaccaaaaatgacctttgtaatcatataacacacaaaatgtactggaagttttcaatagttcatggttttgatatagaatagatggataaacaatacatgtactacttagatcctggaagaggaaaagctggagacatttttgagttgttaaattatttcttgcagtgatgatgactaagaaggataaaagagatccacaattttattttaatcttctacagtaagggaaattgtaataatatctcaaaaagtatgttcttaatctatgagctacttctggatcctgaaaaattataaatattgctgttgacttttcaagtagtgctgtaggcctatgcctttctcagtttttgtgagcacattaagggtgattatttttggcaaaaaagtagagtatagccagctaaatataattgcgattttgcaggggccaggaagcatgaaggatggttgaaagactgctatacacaattaaatgtaaacagtttttcaagcagaaaatttgaagactaaacacatttaccttccaatatgcttaccaagtttcctactgtaagcacattattgaaatggtccgtcattggatagtgctccatggccatgaaaagagtatttaagacaatacagatggtgatggccaggtcaacaaatgggtccatcacaaccaggttgacaacatgtttcacttttaaccaatatggagaacagtcccagattaagaatatgttggaaaatttataccaacagggtgggcatttctgcctggattcttcaagttctagattaagaaaaaaaaaaaaaagaaccaccaaaaggtatactttatacacacacatttatttcatatccactaaacttattttcagtaatcaacacatttttgttacagagacaaccttttttgtacttgttaaaaaaattacagtttactctaaacctcccaaggatatttcatcagacacacacatagagcccaggtaacaatgggtagttttttgtcttatgcactgacattgtggctcagcacttggcctcaagttaaatgagtggtctttcatgtgacgtctcaatgggaacatggtttagggtggtgtagatattgtgtgtgcaaccctatgtgaatgactctacattgtcaacctcagactatgagagctagaatagggattgatgtgacccaagaatcatctttttagcttgtttttattttgtgaaaatgacctgctcttcctctacaatcttgagagtacttaggatgaggctgaaaagggctgtactgctgaagtcttaaactaatggaacaaaaagagggtcactatgactaatgagattagaaacccctaacagaaatgctttgttctgcattttcaaagagttgctacacagttaggaaaacattcttagtcccaatatcactcattttaaaataaattgttaaggcttctagaatatctgagtagatataagaaataacagctcttgaattagactgtcttttcattagaatgcactattcccaactcacaaatatatttgtttgaaatgagacaatataagtttggtgaaaataattgaaacgaaaatagaatttgttaccaaccttctactgtatttgttagaatgctggctatactcattgctcgttgcctttgggaaggatcttctagaaagtccatggaaacgtggaaagaacttgaccttctctttctcatttcagtttcagtggttgttccctgtaaaaaaaaatgctaatgcattaaacaattaatttgagcaatatgacaagcaaacaaccaaatggtgacacagtgaatttcatgaaacacatgcatcatgcactttcatattcaattggtgatggcagatatttctgacttattgtatcattagcctggaatgttcaaactgttaaccatttagtcatacagcaaaaaccaagatgttaacttcctgatttcataattttataaaatacaaaataattttaatatagttgataaaactcttaagagatatatttaacagttattacccttatttctgaactaatagtaaaagcctagtaacttaaaagtcctacaagtgatcaaggcacttgatttttgagaaggtagctatttaattttaaggaagtataaatgattgcaacacacttagctgccatcttattttctggacacaagatgtagatggtcattgacaacacaaactctatgttaaaaagaacacacacatgctgcatggacaacagtttcatccagggtaccaaagcaataagtcatctaattctgacttagtcatgcctcctcatgctgatatatttccaagtgagtaaacagtctaagaagaggcagcatctgtttagaaattcctcatctgagtatacatccacaaacacataacatacctttgtacacagacaattattttatctgtctgtattaataatgtatttgtgtctcttcatttaattttgagaagacctatatcagcattttttagtaagaaaaatatgagtactaggagtattaaggtaacaatgaagctatctacttaagcagtgtttttgaaaatctaaactaaagcagagatcttgaagaatccattggaaagatttattacatacccttgacacttaaacatagaatcattcatttactttcataccagagccttggagaatgtcctgctatctaaattcagtgtgggtatatagcaaatcctccaactggaggcagtaattattgtgtctaatcaatccttagcacttttaataagtaaatgcattcaggtttgtgcaggagactgctaaggttttaagttttagttggttagtctattaaagatattacaagatgcaggtgcattcacagcgtgaccaaccaggaatcattctcaaggttgccgttctgtagaaacactggctggtgcagcaatagtgagccagccatgcctgaactatttaaaacttccttacattgtcatcagtagctggcttatctattatcacctctggcagaagctgtccaacaggcgatgtaggaactgaaggtccaccaaccaaggaaaccacaccattgcaatccacagtgctgtgcatcttcccattcgctggaaacactgccagcatccgggatgacctactggtctgactcaggttgctgttgcgtctctctccgtgtcgtcggggcacaaacaaggaatctctacggctctcgttatcctcaaaggtgctgtgctcatcatctgcgaagtcgttctcagatcccacatcctttgctcgccctctaaagctgaaaaggcttgttctgctatttcgccttggtgaaaatagggagccacggatgctcaacaaagactagaagtttgaaagagcaaacaaataaagtcatattaatatggacatttgaatgtgatttcattttgcaagattatgtagaaggagatttcagcattcataacagaatatggttcattccttttgattatcattctcattttatgtgcattcacattaaattaaattaccttgataaaagaaagtttctagcccttgggattaaagaatgaggagatagattgcaaccttaacatattgaaacacacacacacacacatacacacacaccctgaacgaccatttctcaagttcaaagggaaacatccttagaatatggcaatggacgtggtaaacattcagtgaacactggcaccatgaccttaacaaggccaccttggtttttatggatcttgtctttcaaaaactttcaacactcctcacaatttactttagtccacctttctaaaatcactttaattattatttctttttcacctataaggcattgtattgttggaacttgaagttcatacttctgaaattcagagtcatgtgccttttgatcaagtgtaccatgactaatattttcagaagcatgcatggtgacttataaagaagttagggggaaaaaaaacataaaatcataaaataacctaaggacattcctgatcgactatccggagttccacatttttttttttcttaaaagtgctgaggatcaaaaagattaaatgtcattagttatagacaaatatcagcagacagtatcagaatgacagtccagttctcctgactgtcaacttggtgttatcttaactacaccgagctgtagacttacatatctgtggagtaaagtttttgcataactatgtgaagaagggatgggtttaaatataacacaacagtggttgattcagttgataaaaattcctgagtccattttctaattctccccctctctcccatgttttaattttcaaccatgcatcagtaaactcagcagtgccatacctggtgtggggaggagtacctcttttcatatgtcaatcggttcccttcaatggagaagcgaaaacctttcctcctgatgctgtcctcagattcagatttttggaattcatcctcatctttctcttccccaccagactgctctttctgttttcttttcttcctccgatttcttctttccttagcactcttggaactcaacttagaggcttcagatgagctgtctgagagcctgcctgctgcactgggctctctggaatgttctgaggcagttgccgttgctgcctgctatattgaagagaaatgattttaacatagcacctgaagagactgtatctttctttgaaagggctgaagtatttgcatggcttttaaaaaatatattgaactgactgaagatcatctcacagagaagattctctgcaagtataagaggagattttttttttctttctacctaatgaaggcttttggagataatttagtttgctccatggtaacatttattatgtctctgttaatgctccacagaccacgtattcaaaaatatccaacatgtatcaacaagaaaataaattcattactttttgggatttgatttactttaaaaattggtatttaattagtgttgttttcttttctccgaaaaagaaactcgagtatggaagaaaagctgatgagtttaaggcaggggaatgggataaggacctgaggtcctttctctagttattgaaattggattgtccaataccctcaaaatattattaatcctatttatggacagttataaaatccctttctcacccatccacaatatccagaagaatggggaagggagaatcaatagtttctgctgagcaagataagacatccagttctccaaaaactgtccccaccatcttcaaatcagtactggttcttaaggggcacatgggcatggaataaaacaatgctttttgattatagcttgtactggtactaagttgacacttttttattattatcattgttcccagggtaacctcgataaattaattactcttgcatataaattaatatttctgaaacaactttcttctttagtaaagacaataagtttgtatgctaaacagaaagatgagagagataggagaggcattttatgatttatcacactgtgaggactaacacttcactataaaaacaagtaatcctttttagatggtcaatctgtgtaagattggtaacattcatatgtctattggatgctgctgtatcagagatcattatattatttgatcacttccttataaaggtaataaagcaaccacgttaaaagccaacatatttttagttaaagaaaaaaggagactatgtttaagaactagaggagcaactcttcatatgataaccaataatttcttgttctaagaaaagatgatttcctcctaatgccagtctactcattgaataaaagtctctcacttgaaaataccccaaaataacattttccctttactttgagaatcttaagatgattaaaatagcatgagagagttctattgtggttattattatacacatctcaaataaaataattaaactaaataaaagtaagtggatcatcaaaatatagaaatcattattaattcctcatacaaccacctgctcttaggtactcactttctcttcaatattacgtaacaatcagaacgataaaaggtcagtgccatgagacagggcagctttacctgagctgcctcctgttgctttttaagctgttcaatcatctgctgaaattcggcctctttctgttctgcttcttccaaggtggcctgattctgttcctcgtaggccatggccaccacagccaggatcaaatttattaggtagaatgagcccaagaaaatgaccaatacaaaaaatatcatgtacgttttcccagcagcacgtaatgtctgcaaacaaaaatatcagaattatttctcaatattatttcactaagtggtggcttcaactttcaatttactcatgtgtctagcaaaactcagatataaatagtaattatgttggtcatagcaccctgtactttttttttattgtttctttaacttcagcttcttccttctcttctagcttatgcattcacactatgatttctatggcagaatttttgtattcaccaagaatgaaacagtcaataaaatgccatggagtcctccattaacgacctgagcctttaggaaagtcaaggaacagaccaaagttatctttctatatctgctttttcattttcattacttcccacctgagggataatatttgagggggtagatagggctgaagggagaatgtgccttctgtttaggacaatctgtgtctgagaagggtagggaacaggttttgagccaagaagaaatgggagagaattgcaatccttggcatcactctgctcagtatgtgttataatcaataggatagaggaactcaagtctcgtttcaagttctgctctttctactatattatcatccggttttaatttcataactcaattggttttcttgtatacttttacttaaatggagagtgtggctctttagttctcaccagttgataaagattttcccagaagtcctgagtcattagtcgaaacaaggacaaaaaagcccaactgaaggtatcaaagcttgtgtagccataattgggatttctaccagctttcacacacatatatccctctggacattggctgcaagtggggtaaaagaaagtattacaagtcgttctgctgcctttttactctgatactatgctatgatattgcctagtcagaaagatttggtatttcaaaataaaagtttgacaaataagtaactaatctatttcccaacttttgactgcatatagtcttattagctacttggtgtcatcattaaaatatggtgcagcatttctaataatattttacaaaataatttttgttgataatttgcattttcaacacctccatttcatttttactactatggagtctccagagtttatagctcaatatacttatctaaaagaacaacattgttattattatatactcctaaaaaagtaggaacaggattactcctctttttgtatgtttgctgttatatacagtaggtgtttaatagatatttttctctttttttatacttttatttgaagttcaggggtacgtacatgtacaggtttgttatataggtaaatgtgtgtcatgagggtttgttgtgtagattatttcatcactgaggtattaagcctagtacccactagttatttttcctgatcctctccctcttcccaccttgcacactctggtaggccctagtgtgtgttgttccctatatgtgtccatgtgttctcatcatttagctcccacttataagtgaggacatgcggtacttagttttctgttcctgcaatagtttgctaaggataatagcctccagttctatccatatccctgcaaaggacatgatctagttattttttatggctgcatagtatcccatgatgtatatgtaccacattttctttatccagcctatcattgatggacatttaggttgattccatgtctttgctattgtgaatagtgctgcaatgaacatacgtgtgcatgtgtctaaaagtattacttcttgttttagaaaacataaatcttacctaatatttacataatctcatactttatcaaaaaccttacatatagcaaattaatgtcaataaaattagttggctgttatcttcagtttctataaaaagagagaaaagatacacatatgtatgtgtacatacaaatatacacagatacacacaaattattgacttaccctgcatcagagctatttccacatagtagtgcatctaaaaaaccctccaggaaataatgatatcctgtttgaaaaaagaaagtcgtatgatgaacatttgcattgttaaaaacactcaaatgagaacaggaaggtcaggttctacttttaagtttattgagtaattttaaatatattattcattcaaaggcacaagtatttgtctcttctccctctaaattctagatattctattagatactttacagtgcaaagtatttcttcattatgaagaaatgacattagattagatacagtgcaaagatactttagacactttacagtgcaaagtatttcttcattatgaatgtaaagttagtgataatgacaggtactaacataatctttcaaaaaggtattagcatttgttcaccattctcacgaaaaaaattcattcagtaaaaatagacaggaatgacaggaatttctttgtttttgcaaaacagccacatatttcaaaataaaagaatagtatattttctggtcctctcgcctatatttttaacactatacattttaataattaagtataacatattctcacattttgcagaatataggcaacttatagtaaaatatgcataaatcatatcaacaactgaaatgaaagcaattttaaaaagtcttaaatactaaagctaaaataatgactataggtgaacactacattatctcaaagattcctgtttcttgcaaactccttggcttcttgcaatgtccagttcttctataactttttccttggtattttcaactttctttctactaaatattgacataattaagaactcccctcactgtgctaccagtaacctgtatatacttgaattattcttaggatgacactactatattgtaattatttatttacaaatattcctcctagaaagtcccaatcattaattatttctatattagtgtttgtttgagaccgggtagcctttctgtaaagtttattgaatgaataagtaaataaaagacaaaaagagaaaaacatggaattaaacaatcaatgttggattttgtaagaagatatattttctagatgctaagttttctgaggaatttattccatacatagttctgtacaggacacagaagcacataaggaaaaatatcatttttatttctaatattctgacttccttgaacctagacaggaaagttgacatagtatttcctaactttcaattaaaattaaacaaagagaaaggactataatagtttctggatgaatttttgatatctcatatttataaatgaagttttgcccattaaattcaatgatctaaccttaatgatcagccttaacctgaggaaaatataatttttcagttataatagttacctttaattttaataaatttaattttctattattttcagaaatgaaccattttatttatatttgcatttggtttaaaataagaaccatagatgtttagagctgaaaatgacctcagatattattttacttcgagtattggaaaaatgcagtccaataaattttccctagagagaataaaccctaaataaccctcatagtcagtattttgaacttagataaaacaaacaaacaacagatttcagggagctggtgattgaagtggacctactggcattcgtatcaccagctactaaggaggctgagatgggaagatgccaccacacccaactcattaaaaaaagtatatatatatatatatatatatatgtgtgtatatattttttttttgtagagaaggggtctcactatgttgcccacactggtctcaaactcctggcctcaagtgatcctccagcctcagcctcccaaagtgctaggattataggtgtgagccactgcacccaactaacattttctattactgtctcctgaagctttattaactgtaattttcttctttttaatgtaatactactttttaaatataagaataagatttacttttaggtatcactttatttccttaaggtaataaaataatctattaaactataacactctgaagccatgcattacctccattattttccccagtgtactatacagtttctgatacattaaagacattgtgtaattaatgtataatgagttacatttgcatagtattgtagaattcgcaaagggcattcacatattttatctcctttcattatatcaatcaccacaggaagaatgtatagcaaccaaggatcctaggaaaattctttctagctgaattcttcagccttccaaatgatgataaaatagaaagtggcatttaggagtcaaaactagagtagttatgaacaaagttgttaaatgtatgtggaagccattgataaggtgattaacaaaattcttcttttagttccagaaatataaataatctattatttaaaatccagggggtagaaataccaaataaaatataattttaaatattgttaaatagtttgattaggtaattttctaaaagatcacgtcttgttatgtaatcatttaaaaatatttttcattcctagatggaaggcacattagcaatgaaaagaccaaatatacatgatagtaattcttttttagagggtgttttatttatttcattagttttaaattttaaattttaatttttgtgggtacatggtaggtgtttctatatatggggtacatgagatgttttgatacaggcctgcaatgtgtgctaatcacatcatgtaaaatgggatatccagcccctcaagtatttatcctttgtgttacaaacaatccaattctactttttaaggaaatgtacataacaataattcttacttgaatcttgaatatatgacttccagtcaaactcaaagacagtttcatttataagtgtaccattataattcacagttatattcttttctatactatgttcctccaaggaagcattggtgggaggccattgtatacatttattcctcaggttgcccatgaacagctgcagcccaattagagcaaatacgctcagacagaacacagtcaggatcattacatctgagagcttcttcacagactggatcagggctcccacaatggttttcaggcctgaaagaaagaagtctattactatgaagacttaacacgtgtgaaataataaaagcttcacacaattttcttgaaaacatagatttcattcataaatccaagaatgtttgcaacgctagtggagaagcaacacttcattgaaggggaagaacttatgaagataaactccagaaatgtaatgatttaaacaatgaaatgaagattcatatcccattatgtcgagatagagtaatggaaggttcatgttcttcatggagcctatattaaggaaagggccttgtctttttcctttttgctactgaaacttgtctcatattttcattagggtcagaggtcagttttataacaaaatacctgaataaatattttaaaattcctatttataagtaggaaagattttgctgtacaaccgaaaatggtctgcagtataattgtgccttaagataataaatcctccatgcagactcacactattctttattgtcttattcccttctcttttgttagcaaaaaacttagaagatttgcattgtatacacatagtcattaatgactctaatgaataagaaattacagattggtacatttaaaagggagcaaattctcgataaaactaacatggtgaaaaaaaaaaaaacccatgatatttgtaagtgcaggtcaccttgacctcaaattacagtatctcacataagacattgttaaactccaaggctgataaagcttatgtctaaacaataagaatcattttctttgaaacacctagtcttatgattcctgattttctgtaaaactgaatgtcaagcagagaaggatgctgaatcacatgatgggtccgtctcattatctaaccttgctctcacctggaatgactgaaatcgtcttcaatgctcggagaactctgaatgttctcaatgccgagacattgcccaggtccacaaactctgtgacgtacctgtaatagggagttcacacacaaacacaaaaacaggacacaaagaaaaagctgtaggtacaaagagcctatcctttactctaatcacttcttacctggaattaccgaaatagttttcaaagctctcaagactctgaaagtgcgaagagctgaaaaattgcctaggtttacaaattctgttacaaacctgtagaattaaatcagaattattcaagattttagcaggatttatattacttgcatgggtcttttataaagaccttcttggtgattttaaatgataaatattataagtggtaaatcaggaattagattccatcattaatctttgttcacataatttaaggccattagctaaatgtaaacttcataaagtagacacccttgttgtcactctggaaagcaatgcaaccaacatcatgtgtaacttgtaaaaagaaagtaaatcttggctatggtttagggttttagttagaaaaaaatatatgaaatcacccaacagaaatttaggcatgaaaaggcagtttgccttactgcttttatatatgagataagattttcctagtgtaacttttaaataaaagttaagcaaattaagaacaatacttgatgagggtccaatgctgcgcctattgttactgccattttgttcttaagaaatagaagtcctgtaggccttcttttgagctgtgaccagagagcctagcaaagaattggctcatcctgatcagataggaaattaagaccagacattcggagtcctgagtgtatcagtgccacctctcctgctcctatccactacatcacaactgttagaggccaaaaaatcagctcctgaaggaaggatgagggtaagtgttgttgggctgcctccttctacactctactttcacttagtctggaatggttttctattatttttctgggtctcttcctgaggaagtttgccactagaaaaaaaagcattggggtgcataaactgtgcatattactgagtggatatgaataggagataaggataaggaagtttatgttcagactaaagagatgaagagagccataaaaggaaagaagaaaagaagaaagaaaaggggtcaggagagaaacagaaagaggcagagagaatgtattcctctacaggtcttagaaatcagtaatttaatatattaaaaacataatatttcaagtatcttctttcttctcttagtttgatttgtcagatcgttttgatgctagtagatacttactttcaattattttaccaaaccaataaaagaagctgtgtgtaatatcagcaaggtcattgcaaatttgtgtagccaatagaactgttttgtggctgtaatttttaaagttattttcacagatgtattacaaatatgcttgtgttttgacattagattgtgtgtgttcatatgtgtgtgtgtttgtgcatgtgtgtgtggaagagtggcatatgtgaaattttctgactgatgctacgtgtgaaaattgtagttttcaactactgcaaagccttcatgctatagtgaaattccacttagacctttgttgtgctaaattgaaatccagagtttgaatgtataaatcacaccaaaatattctacaggtaaagcaaacctattcttaaaagcataagcactgatggaaaaccaaactatgttctctcttaaagtttcaaaaaaggcacttacgcaaatgtaatgacagtgaaatcgagccagttccatggatcccgaaggaaagtaaaatcttctaaacagaatccccttgcaataatttttataagtgattcaaaagtatatattcctgtgaaggtgtatctgaaaacaagcatccaaaaaatttgataaagtaacagtgttttttcatagcataccaatttcttatcactccatcagtggaatagataaatactaaaaaagaaaactaagcagatggattttaatttcatacaaatgaaacgtagccctaaatttaaattcagcttcctaacacaaagagttgtttcgtaaagtgtcttaagagtagtgtgagaaatacaaggtatatgaaatctatttagccattgtctgaaatgtcttggtatttatgtaaatatagtctcctgagaaatatttagtatgtttacatgatggaatagccaatcaataatattgcagaagcatgaaatgattttcttttagggaaaaaaatctcaagtttaatagtgttctaagaatgagaggaaactgacaaattagcacgtgtttttttttttctacaagataatttaacttgcttggaacaaggacttctttaaaatcaaagtaaatacttctagggttataagaagtaaaaatttaatttagaataaaattcttctgataattcagaaacttaggtgtttccaaagtttaaatcttctactcagaaattggggtgtgagagtggcataaaatcacaagaaaactagggcgactgaaaacctgtggggcctcccatattagcttcaatactttagaatttttttgtatataaaatttattattttcttcaagatgtcatgtttcttattggtttcagcctggaagtgtctaggaaaggagacactcttggaaataggttggtgcaaatgttggtggacactcttggaaataggttggtgcaaacattagcttcaattgaaggtaatggcaaaaaccacaattatgtttacaccaacctaatacttctgtagttgctatgggtcagcagctgtatagtaacaggcattacaaataggaagtgtgggcaggtgagcagctatggttagagtagcccaacttcagttatcacaaatctggcctctgtgcttcgaaggtatccccagaacagagagatcatcaatatagttagtaatgcttctggtttctgaaagctctacaaaaagttccacttctgttagtttagtcttcagtctactgaattttcaagttctacaaccctgaaactttggattatttttcaatttgttggtgaccacgcttggaactatattggcctgacatgaagtgaatgtgcctgatggaaatgaaaactttgcgaggttcaatgttgtcttcacatggcatttgtaactaaccctttttgattcttgattcaatgtatttatctggaatttaactggaaccaatgtctaccatattggctcttttctgcaattgctttgaccacatttggtttggctactgtagattttaaagaaaaaggggtaaatgtccaagagtggtggtcttcaggtgaacaccaggtacaggcaaaagagagtgataatcagtataacgccagcaggcctgagggccaatgagcattgtcctcttgctgcgtaattttgtctaggaatgactttaataaaatgctcttcagttttattttaagactacattaagacacagtttcaaaatcccaaatgtatatatgttattaaaaatataagttgaacttactctacattctttgtccaatcaggagggttactcattgtcataaacacacagtttgtcaaaatagtgcacataattagcatgctgaataatgtaggttattgttaaggaacacacaaaagaaaatcaaaatccaagtgttatattacaaaaagctaacattgaaaagcccaaactgcagcttagccaaaattcagggataaatgcattgtgggcaagtcttctaatctccttacatttcaatttcttcatgtgtaaaatgtgggtaataatatcaccttcactgagtatttgtatagattaaatgaggtaatgtatatgaaagcattatatcagtataaggtgttgtttttacaactattattaaatcaatatattcacctcccagagaacttcagtgggaagactatttttgtgctacctggagttgcacagtttttcagcagaaagtattgacttgagctcattcaggtgaataaactagtaaattgttgaggaaggccacttatctgcaatattgtaatttcttaaacacatcttatccaacacagttcaacgcatgaaaacaatttgtagtcaaagtacagcacgatgctaattgttgggttgctctattttgactgagtttatacaagtgcagcaggattcgataacattaaaagtgaatattcttgaaggttgacacttaacatgatgggaatgtaattaaaattcaacatagcaaagtgatgttggccaagagactcaacctctctgtgccattgccttgtatctcttcctacttctctacaatggagctaataatgtactcattttgtaatgtaaccatttctacatgcagattaaatgagttaatgtattggaaatgcttggaacagtcacggtacgtaagtaaatatactctaagtggtagctaaaacaaatgaacagacataacagaattataaaactgaaagggaccctaaaaattagtttatcactatattttaaaaatcagggaaataaggccttactaagctctagaggaatcagataaagggtccaggactagaatataagtttcctacattaagatccaatattctttccactatagtttactgccaaaacaaaaattttccataattgaaaaagaaagttttcatcaaatgaccacatgatggcgctaggaatacaaactgggacaaggaaacttccctaagtataaaaaccctatcatatgatttttatgtttcaaatcttttaattttagtaatagcatatttataccactaaagaaatttcttgctgtcatattaaaattagaatggccgttcaaattttagaatcctttaaaaaaaagtatgagcttatgataattataatggtattttaatatctattattgtcaaagctatcaaacaagatacaatcagaagtgaattgttttcctaaattgattaacaaatgaatttagtcgtggagtcctttttaacaccaatgggaatcatgaaaccaaatcccttaagaccatttggaaatatatgccaacttctctcattaacttccggagtctttactaagcaaacagttttgcatggcagcatcataactcatgacttgaatttgaaattcagccaatattccagtacttccttcacaaaaatcatcaggaaatttcaagaattaactaagtactggccaaagactcctgacattctctgacagaaaatatacttaaaggtttattctaagatacactgaagtgttttatatcataactatggataaacttgagtctggaagtagatttttctgttatcatatcattgctcactgaaaattctacaccatcacaaactttgtataaagatggtagaggtaaacatggttatcttactttagatttgtaggattcaatacatataagtgtttttagaaagataacaaaagtacataaatacatgtttatatataatatataaaatgttaaagagtacatgtttcagtaatgtctatgtgattaatgaactttaagaatgaggctaatatgacaaagatgcaaaatgagagtgatgaaaactatataatatggacatttcccaacttaatttgatatttagctataaagtgcttacagatcatgtacaaatagttaatattaatcacttgaaaaaggatatgaatgtaccaaaatcttaatagctattttcctaagaggattgaagggagttaaaatgtacagggcagaggtggcactgaaccggaagatggccttccctttattcaatactataaaagtctgtaagacaggaacacaacatagaagtatgaaagtataaaccacttaaactctgttatctactttctgttacttgtcataataaattattgtaaagttaaatgagaaaccagcacaatcacaatttctaaagtgccccatgaaaacaaactgtcactggatctcttcttaattagagaggaaatccaatgataccacttaccttttacctaatacttaccctcaattttattgtacataagacaattagccaagagaagtcatttattttctcgatattttaagtgtctgagttaaatgaaagtcttaaatgggtgcacatttcatttcattccaaaaaacttaaggcactacatgctttttatagtcatttcagctttcccaattcaaatatcttgaaaattaatcctgtggaacgcaaaatcattcaacagaactgatactatttttgaaataaagattgtttttaccatctatcctcataaaataaacattatcactctcttcgtaatagaaaataaaaacagccaccatcaaacccactcttgggttagatggatgtaatccaataattgatttctggaggccaagatccctggagagtacccgttgaccaggagtgctaaattctgtactgggatttctgagttagctgacatattgaattctaatcccaattgacttcctatcttatgcagtgctttcttatcacagaggagaagctccaagctcctgaagaatccaggatccatgaatgtgaatgaaattccttccaaaaattagacttatttgagatcaattggcagtgggcagacaaaacattaaagaagcaacatgtaagggtataaaaagggctctgactcaatgttttccaaggtgcttacttatatttagacagagccagggagaaagcctttatctctgtgaagagcatatttggggaaggaaattttaagcttcttgattttaaattcacccattcttcgaaagctttcttttctaagccttaggatgcatatctgcacagatcatgttatgatacagcaagcataaatgttatgtttattttctactaagaatctttgtatagtcttagctcattaacagatttcccctatacttgcaggattttctaaattcaagtaaagcaaacccaccctcccacacccctacctgctaatggagttggtttttgaaaattaagcactttctatctggtatgggtagaagtgtcctaaactggctgtgaaagtatggtcccccaaccagtactggttaagtatagatatggagagtccatgtttagaaatttgtaaggcaatttggccaattaatgttgtgtctgtctattctaataataaaaaagtagggggatgttgttgtgggcctgtttttcatttcagttttctagaaactaatttttacttcattttatagaagaatagagacctcacatcctcaacagagtttgagaagcactgctccaagtctcacctctgcctgcattccctctatcatctttgaaggagtatgagtccagaaaacagatagagctttaccacaaagcgcatttgaaggaagggagaatttcacctgtgcttactagaagaacaatcccctatgccaacaatacttagccctctttttctctgattcattgagggattctgtccctgaatgacattgtgagatcatcgtaaatctgaacagacttgtgcaatgcaaatgcctttgctgtgggggaatatgagcatgtaacgacacagaaaggcccaaagtgagctagctcaggaataaatatggtccacctttcaaatgtactgcatatacttcctttccccccagatatgctgagtaaaatctgaaagaaatattaggggctcagatggccagtcgcagtggctcacgtctgtaatcccagcactttgggaggccaaagtgggcacatcacctgaggtcagaagtttgagaccagcctggccaacatggtgaaaccccatctctactaaaaacacacaaaaaaattagctgggcctggtggtgggtccctgtaatcccagttgcttgggaggctgaggcaggagaacaggagaatcgcttgaacccaggaggcggaggttgcagtgagccaagatcgcgccactgcactccagcctgggtgatgagagcaaaactccatctgaaaaaaagaaaaagaaatattaggggcacaggtaggagaaccagtaaaaatataacacagaatatatatattttaaaataagaatctcttgatttcagataatattaaaagctaattttgaaacaaatagtagtgatacaaagagataatgagaaagaaatgacaatccatagatggcctaaatcatgggctggagtgtgaggataatcaagatggtactgtttgtacctccgtggataaggaaaataaccaggctcatcctaaggagacaggaccatacttagaagagaacacctgtgatgctggctccttggccactgttcagcccaaaccatgaccagaggtaataaatgaccaaaacagaaaagacagacaaggagtggtaaagtaaaaggcaaagctagagatctaaaagaagggaggggaaatatttctgccctgagtactaaaaagtaaaagaggcaagattcagaaaccaaacacaaaaggttccaaaaaggaagtctgcctagaagtaaaaagagcagaggattctagacaaaaatcggggaaaggtggggacagagagaaatctgttaaaggacacaaaattacaactagataggaggaacacattctagctctccacaccactgtaggatgactacagttaaaaataatttattatatagtttcaaatagctggaaggaagatattgaatgttcccaacacaaaaaatgataaatgtttgagatgacggatatgctaattattctgatctgatcactatacatcatatgtattaaaaccactatatgcttcataaatatgtacaattattacgtgtcaatttaaaaaataagataaaaggaggtataaagggctgaaactaagtaagatgagtttaatgaaaccaaagcactctcaatgttggtatgtgattctaaatctaaaagtcctttgacatagagaaaattaatactttgacacaaaagttaaaaacaaatgggcataattatcaattgttcaagccttagatgaaaacatttactgattttacagtgtattccctttattcattttaaaaatttaaagaatgtgtagaagattatttggtaacaagatttatatgtgcaatggaaaatacttgcaagttgaatttataaatggaattggtaaggtttttactgaacaacggtatttgttttgctttaatttttcataagacatactgttgtgcaagacatccttgctacccaggaagctaacaataaggccaacattaaaggaccattttttcataggatttcttctgtgagaactccatttttctcagattgaaacatacatgcttatgtacaaacttcatagatgtagctttaaggtattgatggattttaaacagccttccaataaagcaacagtacccagacttgtatagcaacccaatatgtataattttaaatatgatagcactttcatgtcagagtaagttccatttagaatgtcagtcttattatatgtaattgatcttatgtttgtttatttcctcaactgtctgtatcttacctccttgtaattgcttacatagccaagaagccgatcattcagtttataagtgttaagaattaataaaaggatacttgtttccaaggactctcagatacagctttctcccaaaagtggcattgatgatattgaagggagggaagagtctgaaggaaatactgtttgcttacaacaaatacttaagtagctctagagttttcaaatatataaatatttgccttccccgctatacgtataagaaagggctccaagagggaagagttcaaagactagctaagatattgctgtaccttaaactgtataaacaaatattgtgtagctttaagctaatcaagatttatgaactattaaattgggtgactttttaaaaactttttaaaagaatgtattggttagcttattatagtgaagtatcttagcatcctttaaatctaattagttcaacaaagatttcattaatacaacttatcaggataacttttattgcattaagtcatttgaataaaaaagaaacagttcaaagttggtggtggaggagaaaaggtttatacagtagtatctagcccaaaacaaacccctttttaccacccaaggctcataggaacattgacatgactggctccacttacaagcagcaagactttgtggtttagtacaattcaggcacatctatgactattcttaatatttgtccttcagttcattttagtgccaaaacaaatgctttaattgcagttctacaaagaaatagaactgtttgaaattaataacatcattttaacacgtggataattttctgcttcaaaacaaatgttgaagcatggcattgtaactgaggtaacaactagattttatatatgaaaaatcactttacagacttatttgcaggaatgtaacattcatacaatagggttgttctagcttgtcacttatgtcttcatatacaggtaccaagtttattgggcatatatacaataagttggtaattatgtatgagcagggacctagtttaggtccaattgttaatttcaattgatggcaattcagaatacatgtattaactgtttagtacaatatttgcaatgccctgtgctacattctaaagagaaaacaaagatacataggttatgacaccaagacatttataaactaggagatgctcaactatttgttttaatagaatatagaagaattgatgaaggttaccttgaccagcactttccaacagaaatataatgtaagctacaaatctgagctacagttatgattttaaatttcctgagagccacattaaaagaaaaacaaagcaggtgaaattaattttaacagtattttctttaacccaacatatctgaattattatcatttgggaatgaaattgatataaaaaatttttgagatatgtatatttttatactaagtcttagatctttgaaatatggagttacacttacatatttcaaatactcaatagctacacaaggctaattaatctctgctatattgggcagcacagacctaaacttaaaccatccattgttcagcaagctcataccttcttcagcaatccttgccatgtaaaaatcatttctggttttaaagaaaaagcaagaaggaagttatatagaaaaattggtaataaccctggtaattaacagtttaataatctgggaagcaacattatgaaaatataagtatgatttgttttatcttatgttaagggtgcaaactctgaaattagatttctgattcaaaagctaactttgctgccttccagcagtgtgatccggaacaggtttcttaactttctgtgactcagttatctcacttgaaaacagaataaatgtacttagctcatagaggtaatgtgattccaatttagctggtcagattttgatacctagtttttatactttaaataagtaatccagatgattctgtcatagcagggctgttaatatgtttgttacctaatggttgtaaaaaatcacaaaccattggccaaattatcaatgattatgttgtacatgtggattgaaatcttgccccttgatctaactgaatagttactaagaaaataattatgttataatgatttggtagaaattgctatttatgaagctatatttgttattatctagtaatcttttcttgtttctgggcttatagaaagtgatttgtttacaattttttcccaggatggacattgaatttaacaagccatggttttccagtttctttttctcatttaaatatagccattaccttaacatttatttcaatctaggggccatattcttcaaagtacatagtttaaacataagctgtaactttgtgtttcatctaaacattattgaaacattgccaaataacaggactgactccaaatttattgcactttcctactcttaaagtaaatctactggcaaaaacaagaaataacacaggaaggtgagctatgatgatgaacaatacacaaaatgtagaatatactactggttggttaaatttatcctttagcttcaaagtttgaaacaggcaatttccaacttgtacatgagctgtgctccagaaatgcatttggaagtcaattgtttggaaatgtgaacatatattctcacagatacacatatatttctagacccacaggtctatcaaactgttaatgaagtacaattctgaatgaatggcactgagaaactttatcactatgtgtaagaaagtgttactctgaaaatggcagagttctgtccttgaaatagcctggaagtcagaccaggaaaattatctggctctagctcctacccagaagtgctattaagtttttcatagctctaagctgctggcttggaaagaggttccagcatgaagggggagaattagagccatgttgcaagaggagagatgcttcaaagttttgggtgtgaagagcagcatagatggtcaggagattccattagtataatacatatctctggggacatttcttatgctgggtcaattccatggtatataatattttttccccaaggactttaaatggtctcacctacttcccttctcatttgtcatagcctgtgagttcaagccaagcttttcttccttttctggctcactgggggatgaaaagttttcttgcaggctttctacctgactctgaagagagtatgccatatttaatattttttcatctcctagtctcattcaattttttccttccaaccagtgataaccagactaaacaacaatctgtgtcacttgcctacccgtgggccaccaagctttaatatatagccttcacttaatgacagatgtggtccttaagccacagattacaaactaaaatgcccacagaggctaagtgacaataggtacctgccagttttaggcatataagtcagtgatgcctgaactcatatttcaagaggaatccttagatgtataattttatgagtgtgtgaaagattttctgatttataaatgccagaaaataattcaaaattataaataattttgttagtttaacaaaacatgtctgtggactccatgcctcacagtcagtttttaaacattgttgccatatgctcacacaaaagagaagaatttgtacctagagaagagtctgtaaaattgcttgttcctatgctttagctgggtggagggttggggccagtggaggagataactctgcagaaggtgcctccctagaaagtgcctaggtaggcttttgtcagccaaggctgcagagccctcaacctcttctccagcagagagaagaaattataacaacaaggaaaaagaataaaatctggagctgaaacatttttcagccctatatcatcagaatgtacataccatgggtctgctacactattatatggtcagttaatttttctttgactggaaagaacacttttgagcccagcttgattacaagcttgctgtgtgagaactatgagcaaactattcccctcaatttctccatctcaatggagaagattatactaataccaatcttaggattattttgaggataaagtgaaataaaacatgtcaatgcccttagtgaattctaaagtgtcaataaaaatataaggattaaaatatttaaaatgcgtctctgtattctaactcttaaatatacacatataagaacatttctgtttctccaaagcatggccaattttagtattggaattttcaggttcagtatctttcttctcaaacttcctatctaagaaaatgaggccatcagcttccttctgtctgacacctaaacacctccaaaaccaattctgactctatccattattctccatctccattgtcaaaatgctagatcaagtataaaactcctaaatttctccatagagaagttgagtgatttttaacaatgtaaagtggaccatgttactgctgtacctaaatacttgttgggaattcattttgctttgaagataaccttcaaactctttaagatgtactgaaagatcccctttatctagccccaggtctacctccccaacctcaccttattctcttcttacctattacaggtcagcttgattatatgtcttattctatgctgttctctttccttggaagattctcctctccctcctcctttttaaccttcagatcccaatttaaatgccatttccttatagaggcacacaatttaaatttcctgaattgatcctctttgaaaataggtgcttatcaccctactggaatttagtgggaaaaaaaatttctaattattttagaagctaatctagatcactgagtgtctaagattttagtttttcctttgtcacctccctgtctctgtctcagaaacagtcccaagatggtgatgttgataaaaatgaataataataataaataaataaggttttacaaaggcaggaaatggccaagtgttgaaatgaccagtaagggttcgggaaatactgccggcctgggagaccagaatcacatcttgcaaaatggcatgagtaggaaacaggaaggacagctataggcttatttagattccatcactgacttctcttttttttttttccactgctgtgattagtgctatgactgcaaatccaaactaacatggcaatgggccatggaaactcactggtctagttttaaaactagtcttaggcaagttatttaaactcagttttattatttttaaataaagacaagagctatcttgaaagaatctgtggattaaaaaagaacagtaattatactgatattatatatagcatgtagagtacatagcttttttttttttttttgcctgcttaggacaccttttctaacagttcctcttctcttccttttggagtaaatctctgccccactgtcttcccatgtggcttggtggagctgacccaccccttggcaacacaggttagtatatgacagagaccatcccataccaaggagaccatcacataccactagccaaagtgagtggttcagaggaggccatgtgacctaattagactcaattctaggacaactgctagagcttttgaaggaaacctgggccttttttctttcttctttcttgttttagcagaagatagtagttacaaggctgtaggatgttagtttagcaccactggtggctatttctgccatcttgtggaagagccagcctgcaaatgaagccagcatgggtgacagcagagctgaccatggaaaaggagtaccctcatgacattgtttgaggtactgggtattttgatattaaaaccagattcactagacacatttcctttatttttccccaaaagttgtttctgttgggttttggaaactttcagttgaaggatctcctatagatatggcagatactctaaaaatgccaagcatcattttattgatcaacatcaccatcttgggactgtttctgagacagagacagggaggtgacaaaggaaaaagaagcacaaggaagaaatagtgcatagggaagagaaagattgggaagtcaactacagggtcctggatgtaagggagagtctgggtgacttttagttttacaggagctgatgataagcaaagaacagctacacactggggactgcccatatgacaattcgtgaaattataagcttttaataatcatcctcttttctgatttcccgttaattacttttgcaagaaaaactccataattccaattaaaaacaaaacaaactctctccacccaatttaacaactaaaaactcctttggcagtgatagaccaaacatgaatttgaaatcacaaattcatatatgacttctcatggagcccaagaaaaagggagtgtgcatcttttcaggacagttgatagcaagagagaataagttacttttaaatgatccataggactttttaaaaatgaatgcatttctgcactccataattaacaaacatccatttttactacagatctaaaatgtctcattctatttccagtaaactgtcacattgttaaaatgatattttcttccatggtaataatgattcgtctgtaattttaacaagaacatgagaaggaagacattttctgtaataaagagtgggtaaagaatttgaatgtagggccaaatggtacaaaatcagcccaagctatgaaaggaaactgtgaaaaaaagtcccgtgagggaaaaaaaggtgtgttcacaagctaaaatgtgccttgctacacagctaaagtaaataaacaaacaaagggaaaccaatctggaatcatgttctaaagaccactgagtcagagctaacatgatatgaaaaatactgtcaccatattatgatagcatttttttcccctgagtttttaacctggaactctgaaggcttaaaacatctgaggatctaaaaaccttctaatgcttctatgcatcaggaatgttcatgatgcatagatgctactatttctttagttactactacaatattactgaacatggattaaactgctttaacaattttagtagaatatttgaacattacataatttgcacatcttaaactgggacaaagaggataaaaatatgtgggcatatgccattggaaaatatactctcagcagtgacattttaataagctcactgacactgcctttgtaaaagattacagagagcttcagtgtggtggttgtgttttttctattcacataaattccttgcatgtacactactgcactttaacataaaatataacataaggaatggattctgcaaatatttttacaattggcttgttttgtctattccatatagttgagaaagaaaccagagtctttgtatactgatgcaaatgacacattaactattgtactagagtccaactttagggaaatcactagtctaactgcatattccatttcactcaggcaaatctaatccacacccccagtatcagcattagtggaaaatctcgtcctaataaacattttccctggtgacatttccactgtttgaccatttagctgtgtcaagagtactgtgtatgtgtaccgcattgttttaatgaagatcacccagccaatctcagataacccagtcactaaagtaaaattagtcatcgaatattgaaagaaatattcattatttttaaaaggttcagattttgctaagcattccaactttagtcagagcaaattaattccatttaaggatatttttcaatactgaaataatccaattagaaaagaaaattaaaggcagaaaaaagtgtacaggcaacttataaaagtcttaagacataaaaatgcagaagaaggaaatttcaaacacataactcaatcatgtgttctaagcacaccatgttagtttttaaggatttcagccctgcaaaaagcttcgtgtgcattgctgttgaatgacttacatttgaagatttgcttgctgtcagttcaatgtaaaagccatgagtataccttaccttggggaaaactctttcctgataacaatatttcccttatcaggttgttctacttgcacactgtgatttgctccaaaatgccaaaatgcttttctttcctcataccatgtgcatttgaagataagaacagaagatgttaagagcaagtttagacgtgagcctaacaaagtttataagggtttcctcgacacaagaatctggctgtcacttcatcagagttggcctttcaccctcagttttaagatgtttcttttgagtattttgaaaatgtttgcacaattttgttttacatctgtctttatatcctttgctatatataattcattataaaccaattatggaccattttgtttagggacatcccctcgagacaatcacttttatcagtctgaaagctctttaattaaagaaaaaaaagattgattggttgttctggtttccagatgaagaatgtctacctttgtcaacatgcattagtttggtctttctcaaaacattcatttattattttacaaataaggacccagcataggagcagagatactaaatttcttccctgtttgattaagggatagatgctgggtggctttaataatttttagatggtgattgctaccaaagaggtgaggacccggtgtctgggggtagcaaaaggcctgttgaggatggagcccactaacatatcccaagagcagcctctgaataaactaaaagtatccaatggctataaatacagtagcatactctatactgtgaatgaatttctgcctggaacacatcagtcttcacttcaataccgaagtcattttaaacgaattaaaatgtttaggcaattggattatctgcatttttacttttcttatacaaataaagtccttgtagtttgtttagtttgggctttggcttttcagatacattaatttccaaagagttgattaaataataaagtgcaacttttctcataacttaaatggcagttatgagattaataatctcttatcaactaagatttgacaatatggtgttcaaaagcaaagttagaggaaaatgaaatacatggaaaatgatccatcccttcctctactgtaaaatgaatagatcagtttttaaaaaggggaaatatgtagtgattcctaaagtaaatcctagtaccactgtcaactgataattttaaatgtaatttagatttgtagatggtgtaacattaaagttgtataatgtttaaaaaaaaaaaaaaaggaaaatactggccgggcgcagtggctcacgcctgtaatcctagcactttgggaggccgaggccggtggatcacgaggtcaggagatcgagtccatcctggctaacatggtgaaaccccgtctctactaaaattacagaaaattagccgggcgtggtggcaggcgcctgtagtcccagctactggggagactgaggcaggagaatggcgtgaacccgagaggtggggcttgcagtgagccgagatggcaccactgcactccagtctgggccacagagcgagactgcgtctcaaaaagaaaaaaaaaaaagggaaaatatgttatacttaaactgactatatcctgaaaagttaaaaaaaaatctgaacctaaggctagtcaaccttttgtgacgctctttcctccgaaactgtagctgtcaatcggaagtgatttataaaactgcctcaaattcacatattacaaatgccaaacttttgcatgcatttggcaaggactaacttcacacagaactgggccagaaacagagtccctaaaagtttagggggtattttaaggtccaggtccaacaaaaaaatttacttaattacaatctttgtgccctacctttccactaagattcacaaatgcattgtgtcaagtgataaagaagaaaatgttacgaatcacctaacgtcatacatttaatttaaaatcaatgcaataatcttaaaaaaaattttatgctttttgttttggtttggtgaaatgacagtcataatgaacggttggatgcttaacataagattcatttcaagcatggatatgaaaaaagcacgcattcaaatattgtttataggttcttcaggttatgacatttttgttaattcttgccaatattagtacattaataccaaaatattaaataacttgtaaaattctagtttatgtaaaaatgttattttacaggtaacaaaatttcttcaggaaattaattgatttgttgtttataacatgacattgaaattgcaaacccttgtggcatcaaatttgtttgcatgaaaaattagtactaatattttgtatagtctttataactcatgattttgagatttccaagtatttccaagtacagaaagtacaaaaaaattgtatagtaaatcgaatctgtggagagaatctgtcaatttgttaaattagctgcctctttctttccttccttccttccttccttccttccctcccaccctctcttctttcttttttttttttttttttttgacacagtcttgctctgtctccaggctggagtgtagtggcgtcatctcggctcactgcaacctcggcctccagggttcaacaagggattcccctgcctcagcctcctgagtgactgggactacatgcgtgtgccaccacgcccagcaaattttttgtattttagcagagaaggggtttcaccatgttggccaggatggtctcaatctcttaacctcgtgatctgcctgcctcggcccctcaaagtgctgggattacaggcttgagccaccgcacctggcctctttttatttgtcatggtgcatttgggacagttgcatatgttatgatataatcaattcatttctcatgtatatgcataaaccacccacaaatgtgtttcatttcttaaacagaaggatacttaagattttgtgctaatttggcatgtgttggtgctacaacagtccaaggaatgcagtaggcaattagcagcaaaatatgcctgataaaaaacactcactttcttattgatatagtaggggtccaggtcctccaggggctctgacaccatctctggaggaatgtctccataaataaatggaaggttctttccagcttccaagtcactatttggctttgggccattttcgtcgtcatcttttttgtctggtttgggattctttgccttttcttctgcaatgcgtctttcaatagccgcaagagattctctggtgaagaagttgaagctgtcaggtcctggtggtacaagcactgtttgctccatcttgtcatcctgcacattttaattaccatttattctgcatatgaaattcctaaaataaaaggaatacagatattttaaagagtggactaagagatgttaatataaataaattcttgtcatgaaacatgagctagaggatttaaagtctgttttctccttaaattgaaaggtgatttctaaagaaaaaattttaacacaaatggtttctgtgttgagtttagttaagcatcacttatttattaattcttgtgctttactgatacaggaactgtgccatgagttttaaaagtggttcaaatatggccttaatcaaagtacattaggctaattaacactatatcactaatgagttattcagtctgtgacacacccagaagatggagactgtgcgtataaaggcaaaggatagctcatttaacaaggatgaggggaaaaggaattgtctctgagaggacataaaatctaaccctctaggtctgacaagtgattcctggccaagatagtcaggatagtttgcagtgaccaaccttaatgaccaatcaaatagttattgctgtcttgactgggctttaacctcttctaagatttgagacaactggaactatgtcctgctcacttcactagccatgcatggttggcttacttgaacacataaagataaagacagtccacggttggacaaatgtcatttatgtgagtaagaaggagaggaaaactaggctgtaaagaaattgctagatggaggtgggggtggaagaagatagctgtaggtgcaggagacagcaggagtctcctgtttcaagaaaaatgatcagaaagaagtcagggtgccataaactcaatagaaactaagtgtttttcttcactgaagcaataatgaaattcttgctgattctatagtcctatagtgctaaccatattatgaaggcctgaggcaaaaccgtcaaccccatacagcagagtcagacctgatctgatgccagacgccaaatcccaaatgtattgttttaaggcatatttaatatgagctcagatttcacagatattactgagccaaaatattccagagcctaagctgccacttggccatgaattttatttggagactgcattaactcattaaggtcagcaagctatggtacagttaattatagctttggtgtatatgaactacaataagaaaattgcaggcataattattttgtgagggacagagacctcaaatttcaaggaggttctcattgttgtgaggtttataaccatatttttcagagtggatgatcaaaagaagggaggactcaagtttaaatttgtacccttagtctactaagtgaagttttcagcggttcttagaacttaacctgcagttatttagtacctgcaagaataggttgtctgtaaatcaatgaaaactgaatgttctgtctacaaactctggttcccctacaaggcatcaggaaaatactaacatttattttttgcaaataaaagtttagggataacaaatatagtaacttttctcaaaagggaaataaaatattctgatgtatatatatagtttttatttttaaatagctttttgatagaaaatatatgtaaatgatataaatgcaaatatctaaaagaaaatgcagtataatatctcctttttaccttgtttccccaggcccagttccccttcctagaggcaactactactacttatctcccatatatatttccaggtattcaataggtatatgctagaacatgagtgtatgtatacatattctattttaaaatacatattcaaatggaatcttattatacaaactgttttacaccagcattttttacttaaaatgtatattagagttcatttatcttaatttttatagatttgactcgtacctattactggctacatgggtttccattgcatgttatgtgccataatttatttaaccaattccctgaatgtgagtatttgggttgtttccaatctttagctaatattgaataaagttgcaagtaatacatttttacacacatactttcaaatatatgtggatatatttataaaattaatttttaaaggtagacttggctttgtacagaatgtttatttatgatagttactgcaaaactactttctatggagtttgtatgaacttattctcctgacagcaatgtaacagagtgcctatttatcctcaccaatataatatgttatcatatttttgatatttccaatctgacagggacaaagatgagagcatattataattttaatttgcatttgtcttactatgagaaaagtggaatatatttttcttatacttaagaattattttttattttctttcctgcaactgcttatttaaaaacagcccattttttccttctatttttttcaatctatagcatcttttaagacaaaatattagccacttgattttttgatgtgtggtcttttaaaaatgtatattttttgactttatggtgctttgtgctacagattttaaaagatttaattaaaaatgttaaaattgttaggtgattatctaattcttctttggcttctggatactgtataatgcttagaaaggcatccagagagatgggcagtaaggggtaggaaaaaggatataaaatatatacatacacacacatgcatctgtatcacctttccctcttgtatttttagtattttggtggtttaatgttataagtttaaatattttatctatttggaatttattttctatatggagtgaggtagagatcaaagaacaactaaataaatgcagagacagtccatgtctttgaataggagtgttcaatatatcaaagacactagttcttcccaacttgaactaaaggtttaatttaatttctgtcaaaatcccagcagttatttgtggatattgataaactgattttgaagtttatttggaaaggcaaaaaacccaaaagagccaacacaatgttgaagaagaacaaagttggaggactgacactaacccaactttaagacttactgtaaagctgcagtaatcaatacagtgtggtactgacaaaagaatagataagtggatcaatggaataggatagtgagtgtggaagaaggcccacataattacagccaactgatctgtaataaagaagcaaggtaataaaatgaagaaaagatagtcttttcaacatgtattgctggaataactagacatccaaatgcaaaaaaaaaaaatgaacctagaccttatgcctttcacaaaaaataattcaaaatggatcacaaatctaaatgtaaaatgcagaactaaaaaactactagaagataatattggagaaaacctagttgactaaatttgttgataactttttagttctctgtttttcttggaactgtctcatcttcatatttgagttctggaatatttctggtgatattctcagtgctatatatttgtttttggttttctaggagtgatggtgaggaggaattgtgccagcttgcttcttcactgccattttggaaccagaactcaggtgatgactttttagatataacaccaaaggcacgatccatgaaaaaaaagaattgacaatctgatatcattaaaatgaaaaattttgctctgtgaaagatactatcaagagaataggaaggcaagccacatactaagaaaaatatttgcaaaagacatgtctgataaaggactgttaccccaaacatgcaaaaaattattaaagctcaacaataagaaaatgaacaatctgaataaaaaatgggccaaagacctgaacagacacttcaccaaagaagacacacagatggcaaataagcatatgagaagaagatgccccacatccatcatatgtcattagtgaaatgcaaattaaaacaataagatagcactacaccctcattagaatggtcgaagtccagaacactaacaacattaaatgctgatgaggatatggagcaatagaagctcacattcattgctggtgggcaagcaaaatggtacagcaacttggaagacagtttagcagtttcttaaaaaccaaacatactcttaccatatgatccagcaattgcataccttaggatttaaccaaaggagttgaaaacttatgtccacacaaaatcctgcacacggatgtatacagcagccttattcataattgcccaaacctggaagcaaccaagatgtccttcagtaggtgaatggataaataacctgtggtacatccagacaatggaatattactcagcattaaaggaaatgagctatcaagccatgaaaagacatggagaaactttaaatacatattactaattgaaagaagcaatctaaaatggacatacagtatgattccaactatatgacattatggaaaagacaaaactacagagacaataaaaagatcagtgattgccagggcagtgaaaatactttgcatgacactgtaatagtggacacatgtcattatacatttgtgcaaacccatagaatgtacaataccaagattgaattataatgtaaactatggactttgggtgattatgatatatcaaattgggttcatcagttgtaactatatacaatacctaaacactgtctctaaaatagctcttgaatcaaagaggactttgattctaatacatataatatagcacatatgttaaaatatacctatatacaatacaggtatatttgaactgcgtttaatttgttaatttagggaaaaaattaatttttttcctaaattaattttcttccattgtattttttctcttctaaatagattatttttacagtaatacatatgtgctactctggtgcgagatattgatagttgggggaggctctgcgtgtgtagagaaaggggaaactctatatttttggcttaattttgctgtgaatctaaaactactgtaaaactagtctatttcaaagagaaaaagtacaatggaagaaatgtttctaaatacaatgtaagcattttttaaaagctttgaataaaccaaaagtaaatataaatggatggaaagttatatcctattattagataggaatgctatatcataaagatattaattttccctaaattaataaattaaatgcagcctttgaaaaataatcacaaaattcatataactagagaaatctatttgagacttcatgtggaaaaataagcaaacaagaataaccagaaaattcttaaaatgaattttggtttcaaagtcctcactgatgcaagaactatttaaaagaaagtgtttaaatttttcaaatgatagattttccttctaagttttaaatttatgtttagttttattaccctatgctctgataatgtagttcgtaccatttctgtttcttggaatttattgtgatttatttttatcctaatagaggttgtttttaaaatgacttttctaagaacattaaaaagaaacttattctttattttaaagcagtagagttcattatgcctcaattatattgatcttatttcttatcttatgtagaccttctatgtctgtacatattttttttctacttgactgttccaagttgggagaggcaaattaatgtctatttaatgtgtttttatttattgtggtttctgtcatttttgttctatgaattccaatgcggtattgtttgatgtgtagataacacttatgatcagatctttggagtgaattgaaccctgtacttccttaaatggcccttgtttatcttactgtagtttcttccctttaaagacaactttgtctcatagcatataatgactttaatttctacttatttgcacttatctagtatgtctttttccatcaattcggtttcatccttttcattttactgttttagcactttccttaatatgtatatgtttagatatcatatataggtatattttaacatatgtgatcattacgacaatcaccgtctttcagagtgccacacttgatgttattgtccatgaagttgtgtgaatggacagaaacagttactaaaagccttcctattctccagaaatactgcatttgagaaaagctctctaaagaaaatctccctggtcactagctatcatttactggagaaataaacaaccaagaaagtagaagacatgaattctacactgacaaatatgatcagttcaaacgtattatatataattataaattagttagatacaggaattatattcatatgtaagcaatataacccatattataatgaaatcatactgatactagaaaaagtatttttttaactctaagtagatcttctattcaaatgctacctaaaaataaattatgttatattaattataagaataaaactcattaaaaatctcataaggttaattatgaaatacctaaaaaactgtcagatgtcattcaatattaatattttttagtaatatgaaaaattgttctaaattacatttgaaatctgtacttattctattaaaatacagaaataaatcatgaattttccatttacacttacaaaggagatttcacctctttattctaaaaatttataacagaagacttaattgtcctaatttatgaaaatacatgtcactagatacggggtagtaacctcatagaatctgcagttttggcttacagctttctcttttcataaaaaccagcatttaaatatttggttacatagaggagaccttgctcctttcaaaagaggtaagacaatgaaactttcctaacaagagaagacttcaaagagagaggccttttcaagatgattatggttatgcatttggacaaaataaaattaagaagagaactaagaaaccatagctaggaagaaaaagtaacaaagtgcatgttagcaaacttcaaatctgaaggaattttaaaaaatattggaaataagtagagtagtgggcaatagaaaactggaagaagaatgattctttggaagacaagaaaaatacattaaaagtggaattcaattagataagcaatcctaaagaagacaggaaaaaaataatccaaaagaacatgaaatggaagtgagagatcatgggggaaaaaaaagattgtaagaaaatgaagtggaaattttgagtggaaagaaatagtaaagtaatagcaataacatgaccaatatcaaataacgtggacaaaagaattataaggaaaaatttgttagaatatacaaataataaataaagatataatatcatctggtaatatctaactgaaagaaaaagagggaggtaaatctgtagcattataattaacagattaccttctcgggagactttacaagatcagaaagttaatactgataatattcagtgtcatttctaagactttactaattcattacttatcataaatgttctagtactagatgaggtttttgcttctgggcattatatatctctgtttcccgtagaagaggacacatgtattacgttctggacttgaggaggcatttatcacagccaaaagatgtttatacttgaggtgactgggagtggtaaaccatatggctttggtgaccctcaaagtgcagatggaggagctttatttaaagtaatcctaacccatgaagccttacagttaaactcccttgggcatctgcttttctccagtcaaacaaatatgtacgatagctcacaatgaagtatttcattttccctgtggcatttcacacagaagtcttaactgtaaaggcaaccttataaatgctttgtacccgaagaaactggccttttataagtaaatcattatgtagtttcttcctttggagggcagctctgtgtgactgcttgggcctctgtggttagatctgtttggttaacgggcttttgggctttcacacaaagctatactctccacaaacttctgtgagataaaaaggtgatatctgtcttagtcctctgaatattttttctttgttcagaacctgagaaagatgaatgaaatttagtgtttcccatccccgagagacacccagcatccacaacttcacactctgatgccattgtgtatttatgcaagaaataccataactaaggtaatgtcttgagattttttggttcaataatgtccttaaattctatgttgtttttaaagcctaaaagaaattccccctcctcactcccccgtctctccctacaacctggtgagacaattctctcattttctcctcccagtttccaatgctattgttatgatctattagaataattgctattatttttttgccttatctgaccctagaagtgatttacagggaaaaaaattactaaccaattgattagtgaactgaatataaagtgcagctcttatggtttattcacagacaagaatatatatagtacttaatgtgatagtattttgttgttgatgtggaacagtgttagtctataatacaggctttcaggcagacaagacctagtttaccttgacctctggacttctgaaaggttgagtaagttattttaagagaattagacaaagataagtaaatcaaaaccaataaatggcaaagatttaaaaaacagagattagtctattcctctcatttaatagaaaacaaactgaatcaaagaaaaatgggcaatttctttgtttagaacttatgtgcttcctactttcaaaataaatatgtcatttgtcccaggttacgcagcttattaatggtgggacttaaatcagaacttttattttctaactcccaaaccagtgtctgccaggtcctaatagttatgaaatattcttttaaagctaaataaaatatatgaaaatataagtagctgtgttaaaatagtatttatctactctaattgatctaggtctctccaaggaatttatattacttggacagacccaaaacaaatacagtaaataaagcattctggcaaaaatggagacttcaaaattttgaaaaatgggagactccaaaatttaaaaagatgattgtaatattcaagtttagaatcatatgatgcaggttttaatcctgctgaactatacctccaccgtcaatttatgttttacttccgttatgttttatgtattgctaaactggattatttctagttactaactgagcagatgactttatataatttatctgtaactccaaagttcaatatagttgtgcaacatttatatatcttcaccaccttataatatataatctgatgtggagaaaaattatatatcttcaattctgtctataaagtagtttaatatccatactgaagagaaaccaaaaagacttctgccaaaatgcttgccatctccttgtaaagagctattactattctggggacataaaccatctgggcacgacaatttgtgaagtgtttcagttcgttttgtagtgttcttgccacctactttacaaaagaatgttactgccaataataataaaaataactaggtaaaatgttattcttactgttgtgatctcacataactattttttagcagccaagaaagaaattggtttttacatagaaatcccaaacctagaaagtattgttttataaatttcttttctagaaataatttgatttggtgtaattataattacaaaaatatttcatttgatttctcaataagccaatttttagtaggttggggttaactaaaacaacatatttcagccatatgtttaaaacttttacatttaaaaataacttcattatctacccttagtttttcatgccttatgcaaactgcagttaaaataaggtcagatatctaacatatgtctgtatctacatttgtatactccaggggtgtttttcaagacaccctaataataaactaagaagtaaaaaattcattcaatctacatacaatacatagaaatacaatacatagtttttgcctgagattcagatctcaggcaaaaaattcattcaatctacatacaatacatagaaatacagtacatagtttttgcctgagattcagatctgccatagtttattaggctctgcctgtagttttctcatgaaacacatcagtatcattaggatgattaatttcatttttttccttacagagaagattgtcattaaagagtaagaccatggatagttcacataataaatcatgtgaaatttaggatctcttctagacgatcatagtcagaataatttaagggaattcctttgaacaaatgtcattagtttatatcaagaatatagtaatgactgtcattgtaagtaaattatttaagttaacctcttttagtaaagttttcctgttagaaaataagtaatcttattgtgtgggtgagtggtcactcgacagagatttgggaggatgtagagagtgaagtctaatcctcgtgactgtgattgtggttgcagattttgagataccaagtgtgaggtgataggcacttaaagcccagtgtgggcctcccagggctgtttagctagcaatgagagaggcactgcctatatccaagttgtatatggcaggttttgcacaaagtggattactcgaagagaaagcctaatggccagtctattcatcttcccctttctcgatgttcatcttttctctcccagctctcctttattctcaattttctttttttttttttttttgctcagcctccatctcacttccgttgctgtcctctccccaccccttcccactctggactgtgcctctcctttgtagacacttcaagtccattctatttcattcaaaaaccatggtctagaagtaacttaatgtaaacccacaaagatggagacagaatgaatgccattcttcttgctgctctctcagacaatgcaggtcatttttgcctatggtgctggtaaagccaggagttatgtagctataagtagcagccagaggaaatagtgcctgagtcagcaattgtctttttattgctgtggggcaataatgggagaaaaaatcaggcttggtacaattccctttgaaggaaaaagatgccaacactagcattttaacacaaaatgctggttgggggttgggaggaaggatgcttacattccttctttggaaatatctactttgataaccattttggtaaaataatgcagtgttttcagtgtgcaaatcctttcaggactcatggttgtatggcagacgcacctgacagcaataatttaagggtaccctgagaatgactctgtggtctaaaaagaatgtgtgtttggaagtctgaggtaagaaatctggctggaagtggccaacctggaaatttgctccttattattaaggatttccaaagcctggtccattcctcagaatgtgggccatacagtggatgaagccctttgtttggattaaatgaatgttgctaggtggagagtgctaagtgaaaatgctatataaactgcatgctttttacaaacattagtggttctcccatccagcccactgccactggaccacccctgtatatgagtcctagataaatcctatgtctcccttgctggcttcaagtctcttctttagtctcttggccatgatgccatccctattggactcaatggtgttccagcacaacaatggtatgattagactctgttcctgggagacatacaataccctcctttggtaggatctatgtggaatgtttagtcattagtgttattaagaaatcatagttatttaatttatgttttaagactttcacctttcattctctgaatgttagttagctcagggtgtgaaatggttcaacagaaatacttgagctgctgcagccagaaggatgtttatggtgttatgcaggaaatatcctgcagaattctgtgtggaattctgctcagaggggtttctctttagcataaactcaatttaaaaatactcttctgctcaaaagcattcttatgaaaccacctcaacacaaagcaaaactgtccaggcatagttgctgtatggagagatacagcatagaacccacgggcagcggggctgaagcagagaaaaactgcaggggaaagagaaacagatccaggaacggggagaggagagtgttgagcacaaattaactaccctggggaatgagtatcaggtgtttgacactttcacttttccaaataacctgaagacaaatggaacctccctgagttatgaaaaattgagactagaagtatcagagctgcagaattcatttggttcagattctgtatatataaaatctagacatagaacaagtctaagcaaaggcatattatctgcaatggttactatggattattgttcagagaagaaccattttggtatagagaaagctgaaagaacttacagaaaataggtcttgaaagatgaaaggcagagataatttcctgattcagaaactcagtatattaaattttctgtatgttatttatcatttatgatataaaattatgcttaatttatcatgtaaactgaaaataaaattctaagccccctgactgaattgaccttctcctggccaaaaggatcccagagtaaccttgaagactgaattctcagccatggtggatcagggagtcagacatacctccttataacccctccctcactaaccactatgaggctttcttccctaagggctaaacagaaatcagccctttcaaaagactcccccactgacatggaccaaccacctgacactttccctccattggtgcctcataagagaccacccactagggaatgattctagccattccactgagaatgtgcagtaaggatttttgtgtcctctgcttcaccttttaatgtcagagggccgaaaactctaccctcggatcatgctaatgtcgccattttttccacatggatcccacaaaggggcatgaagctcagttgaggatgtgcatgcttctcctctcataaatattcatgactcctcctataacttattgaacatatatatttggccaccgtgcttagcataaatttctgtttcctttttccctcccttgaagtgtctgtttctggcttctggctggaagttatgcttcccaacctgtcagaaggtcactctgcaggctgcagccctttataagaaataaagctctcctttccaaatttatgaacctcatcattcttcaggtgataatcatataaacgtctacttaagtttgctttcagtctgtcatgtgaattcagtcattctcactatattccttttgtggtatactggtctgggttaaagagaccctctagggattattatacagtttcgtcttgtttgagagctcagcagctgatgattatcacagatttgtatagagtggacactaccagatgtccagcacatctgtcacagcagatgtgacattgagccaagtctatttctgtctaggtgtatgatacttggtgctatactttggatatggtttgtcgccatcaaatctcatgttgaaatttgattcctaatgttggaggtggggcctaatgggaagtgtttgggtcatgggtggatccctcatgaatggtttttgcctcattctcactgtaacgagtgagtccttgctctgttagttctcatgagaactggttgaaaaaaaaaaaaaaagagcagcctggcacggtggctcacacctgtaatcccaggactttgggaggctgaggtgggtggatcacctgaggttgggagtttgagaccaggctaaccaacgtggagaaaccctgtctctactaaaaacacaaaattagctgggcatggtggtgcatgcctataatcccagctacttgggaggatgaggcaggagaatcgcttgaacctgggaagctgggagggagaggttgcggtgagccaagagcatgccattgcactctagcctgggcaacaagagcaaaactccatctcagaaaaaaagcctggcaccccaccctgtctcttgtttcctctctggccatgtggtctctaccccacacaggctgcccttgccttctgtcatgaggggaagtcacctgaggccctcaatagaagctgattctggtgccatgcttcttgtacagtctgaagaaccataagtcaagtaaacctctttttaaaaaaaaaaattacccagcctcagatattcttttatagcaatactaaatggactaagaaacatggtctatacagtcaattttgttcatttctttaatatttattgaatatagacaatgtgcaaggcactggttagagatgtggagactatgaagttggcaaatagagaataataatattgagaatcctgcaaagtaaccaaattgattttagaagctcctttatgaaatagactttaggctttagtcttcttggatctttacttggaaatttaggtattcctgattttaacagattcatttttttaagtcccagagtagaagaaaatggaggttgaacactgaaacattgactttgaaaactgaacatctctgtcaatcccacaatctgtgtgtttgtgtgtgtgtgtgtgtgtgtgtgtgtgtaagggtatgagctacaacacaatcttgaattgtcactaaaccatttttaaaataattggtcaaccacccatcacatcacttgtattcacaatcccataaagttatcagaccagagtgatttttctctaatctagatgtacattaaaatgtgcatctcatttaaagatagttttggtacatcaaagtgaatgttgataaacatgtaagacaatggaatataaagttcaatgcatgtcctgcattctctccatctaaccatttttgtggtgccaatgcctattttcaggtgtcaatgatgaagaactggaaaaagatatagttaaaacaaaaattgctaaagaaaaaaatgcatgcttttttggattcatttctactctttcatatcaatatgttttctaacatttcttaagtgctgagaaaattttcctttttgttatcctcaatagcaggtggcagctgaaattgttcaattatatgctttgttaaaaccttataaataatttaaatactattattacagtcagctaaagcctatgctcaaattatattttcttttgtttaaattcccaaatatatctcacctgctaccctacattcacccccagtaaagtcccaaagcccgtgggctaggtagggcattattgttttagaatgttaccaagttggcctagaagagtacttgatttgttgcgacaactgttgttgttctctaggtagagtgttgcgtaaaggaaacagtgatgtccaaaggggctggactggcagattggaagtagggagacccaaggtcagcattatgacatggaggatatgagtaaccaccataatgatttaagatatctgaacagggttgccagaaaaaatacatgccacacagttaaatttgaatttcagataactgatttcttaaagcataagcatacctcatacaatttgttttatatttactatactttaagttctgggatacacgtgcagaacttgcaggtttgttacataggtatacacgtgccttggtggtttgctgcacccatcaacctgtcatctacattgagtatttctcctatccctcccctaggcccccacccctcgataggccccagtgtgtgatattcccttccctgtgtccatgtgttctcattgtctatatttggggcccactgctagtaaacattattcattgtttatctgaaagtcaaatataactggacagtttgtatgtttagtttccaaatgtagcagccctatatatgaagaaagtcttctctgctaaaaaaattattttcctgcttcctgaaattcaattaattagcattttcagttcagttagcaagcgcttccttttaaaagacaagtatctctgggagtacatgagtcgtttatgcatcaatgagactacttacttctcaatgtaaaatgcatttctcactgtcaaagtgggttaatcaatcagagagagggcgtaagagttctttttttggttgactaggtaggggatggggctggctgggacctgttaatttcagtggaagaatacatatggatgaattacttttagtggggattttctgatggaatgaattatcaatgtgccaggaagagactatataaaaagatggaatgggggtagagagtgtaaggtggtactgacagaaaaaactcactcattctaggatttttcttgaacaattaaatactcatgagaggaaccagtgttgggttttatttttcaaacatggatgatggtaaatgttaaaaccagtggcaagcatattttcacatttctttcattattaaaagtattgatgtaagattatcctcaaatatatgagtagtgcatctttgcacattaaggactcctcctttattttatcacttcgctttaactccgtaggtcctatacaaaccaaagaaattatcttccttccttccttccttctttccttttttttttttttttttttttttttttgatatagggtattgccctgtcacacaggctggagtgcagtgatgagatcatggctcactgtagcctcaaacttctggccccgagtgatactcacacctcaggctcctgagtagctgggatgcataccagcatgcccagctgatttttaaactttcgtacaggcagtatctctctatgttgcccaggtggtcttgaactcctggcctcaagtgatcctcttgcctcagcctcccaaattgctgggatgacaggcatgagccattgtatccagcaagaaagagaaaagaatttaaacttctaaagatgaaactgctacacgtggacagccataacaacaaagagaagagtactcttaagcatttgtgaaagtcagaaacctataaacttttgggaaacaaaataagtatattttccctttaatcttacaagtgatgcaatacacttctagcaaaagtgaaagggcaaataggaattttgcaacattgagctctctttaagcagaagccaggccataggttcttcactagtcaccagggtctacagcctttattgtctttaccagtcactaggtatgagacattttctcataaaatgtaactactatacattcgccacaaactttaaacccccttttcacctcccatggtacccagaagagtgataggtacttaataggtcctcaaaaattttcagctaatgaataattgttaattaaaacttatactagaagcaaactcttaaaacatattctaagtactaaagtctaatattttatatctattggtttattcatattcttgtttgttaatcctaatcaaatagtgcaaagtttaaatttcattttcctaagatttgttttaaaataacacgatttacccaagtgatttcaaaccacaattacattctgtttaaattactaatattttattgcatcacaatctgcatgaaacagatgtcaggatataatgaactaacctgcattgtatttttatttttgtctcctgtggcataacgatttcataggaaagagaactacacagctgactgactgatggggaaagttacacaatggatagctttgcagcaacatactaatgcggtagggagatgctgcagagaggctagaaataaaatcatttctttccggagcagcactgcttgctgtcggctgagacaaaaaagagatttcctttttttcctttcttttttttgaaaactcacataacattaattctgttaagcactggatacacggaaaggtgtttaccttagaaaatcatttagcaatttttagaaactagacatatagcaattttaaatctttttaactatctaatgaccaaagcagagggtcctcacaagagggatttagatgctactgaattgaataaagaaaatatggatacatttattgtatgccttattcagtttgaggttcattttgagtttagaaatagggatataaaaacatcaggggttaaatagcatgggtaaaggacatgaaccaagctgcagagaagaggctgactgcctgctatatttgcaggcattactcagcacttttcttaaaccgatacatcttgctggctgcataagcaagacaagacccttttccctatggctcaggaaggcagagaagtcaacttcagccttgaaaaaggcaaatactttagtgcaataatgaaatcaactaaacgtcttgtgcttaatgtttctttccccacgccactagaattgtatgcataatcattctatgcaacatattgaagaaaccaaaatgtttgccacagtgtgctcagtaatttttttttgaatgaatgaataactgaattcatgatcaatgccttatcctaggtcacctgctcagtgcacgggctataggaagggcaaatgtcactgtccttcccacccatctcattctaacacaagtgttatcatcaaactaaggaaactaaaacatgtagccataaaacaactgtttagagcttcattcagataatatttttttctttaaaatccaagaatgtaataccaaattttaattaagcgaaggcgtctttgtggagaacttaaataatatggcatattgctttctgtttatctagtagagactacactttgaaaatatagaccattgcattcataaaaatcatgtggagatctttttgaaaacacatagtccaaggtcccacctcaagattttgtttcagagatctaaggtggacctagaatctgtgtttaaactgcttgtccaggtgatcaggatgtagcactcatagttaatgaatgggcaaattttgagaaacactgttttagagaatggtctaggaaaagcatccattacaaatataaaaaagcaagcttttggtacctaagggactgagtcgattcatgcaggtattggtttgttgattaaagatgcatccataattcaattaatttaaatgttagaacaggtcatatcttttgggtttatttttaattgtttcgtacagatgaggtctcgctatgttgcctaggctagtcttgaactcctggcctcaagtgatccttctgcctcagcatcgggagtcactgggattaaaggcatgagccaccatgctcaggtaggaaaaaatcatttcttacatggagatttattttctcaaccaggtaagttttgtgataagatcattaaacttagaataagaatagtcaggttcaaaatttggttgtagtccttaacaaaactgtgatattaaaatagtaccttggccttgcttagcttcaattctatcatttataaaatgggaataatttttataataacacatgataggtgccaactcagccctcactccttttttgaaattgtcctccatgtaacccatactgaaagtataaactatgtttataccatgtgactctttcacccctttcccatggccacagcttggtaggttttatgaggacgctgatcacggggcactcatctataggcttaactgaaacaatagaatttgctttctgggtgatgtttaaatgaagtaagagtgagtgagtcagaatgttatgagaagatgcactgcatgacctagagttgaggatgaggaagctatgtctggccatgaccaagcagaggatatcggccaaagcagaaaaaaaaaacagaaataacagtagccatgcaagcattcagaaagaatgtaggctgtgttgatatgtttctggacttctcattccagtttaatctctttatggcttacttgggttttggcctatgggattttcagttgaattcttctttttttttttcctttgagatggagtctcactctgtcgcccaggctggagtgcagtggcgtgatctgggctcactgcaagctccacctcccaggttcacgccattctcctgcctcaacctcctgagtagctgggactacagttgcctgccaccacgcccagctaatttttttatttttatttttagcagagatggggtttcaccgtgttagctaggatggtctcaacctcctgacctcacgatccacccgcctcggcctcccaaagtgctgggattacaggcgtgagccaccatgcatggcctgaattcttataataaataaaccattttacttatacccgcttaaatgtgcctttatgttttgaatacaagtgttctgacaaaagcacaatgtaaaaacactgaacataacatgttcttaacttttgttttaaaacaaaagaaaaaaatggaggttcagcaaagttaaatagcacaagttaataaagtgatgaccattgtcagacagtttggaggaagtttgagatttaaatccgggtctaatctttcacagttcaatgctcttgttttaaaaccagaaattcaggcagcaagactgatatttcattagaaacacttatgaccccaatatgttttcacattgagaaactgagtcattccactttttcatgaaaatagctaaaagaatccttatcggtcaaatctttcacacacacacacacacaaaaatgatctttaacattatttcaagtacttggacaaataccaagttgggataccagagatctatgttatgaaggatggataaaacatctgataagaaaaaaagaaagccattattattacaccttaaatattaaatgagaaaacaaggaatgacccttggagaacgactaattttgagaattgtatactgatagacgtgttggaatggactacttgcaaacagaatcactgagccacttaatgagttgagtggttgaaagtgtccttttaaatgatcaatttagaccccagagaatatctgccagacagaacaagttttagtgtagttgatagtaagttgtgcccagaatattaaattgagtcaaatttattttccacataaagtcacagttttatatgtcattatataatctcttggcagaaataaggaataacattctgaatgttgcactccaaaattcaaagaatcttagtataaaaatatctagcattttagatgtttcaaagtagggccaaatgcagaaaataagttggatatgataaaaataccagaaagttctattcagttggcatcttactagcagtttcatcttctaataatttagttgctacgcatggagtagaatagaatttaacaacaacaaaagatcattaaataccaatcaaccaaacaaccaaacaccaaaggacctattaaacttcaacgatgctcagttatactcttgagggtacagggctatcagagatgggcagtgtgctcctttcctgtgtagtctatgggatctatctatgtaaccctccatgtgctcctacccttccccttcagctgttaaaaacacaatgccaaaatcaggatcaaacaaaaattgcagttacacttctgaatttggcaacatctatttcaccactccttttagatcatttggtctttattattctgctttatattgtatttgattttgtaagtcagatcaaataatttttggaaatagaaaacaaacaaataagctccccattgctacagtttatacccattttaaatgatttatctttccatagggataaaaattcaattacgtaccctccttgtgacaaacctccatacaattgaaggcagttattatgtctctctttagttttctcttttccaagctgaaaaattttcaatattttaacccataggtatgatataattatttgtattcctcttttgctcccttctaatttctgcccaacttcactaatctccttagggtagaaactgtaatagaataatggtgataagaacagtaaaaagatgatgtctgatttttgtatacatttcccttagtacgaattactgtgtcaagttttttagtaatataatacctttatttagcctttgtcattgtacaagccagtttgacattttaacaaagggggattgaaacaataaaactgatctttaaatataaaaatatcccatgatcccatgattctcctgttcttcctgctatcaatcagaaacaacgatgcctgttaaataaaagagccttattggttctaccaaatttgtgactaattagcttctctgccatcctgttatttgtatagtttgttcttggttcaaaatatactacacgctaaccaaacttgacactagagtctcacttgccttgatgggccaattcctaaaggtttcaaggttattctgtttcctatttatacattcctcagagctattaatatcagtttcacttaaaatttatatttaatgtcaatacccagcatgaaaaactattaaatggtaatagtctttagattaatttagataaatggtaattaatatatttttccaggatgtcataaaatcatcattacttaccttgaaccacttgaaccctcccctaaaagcaatatgatacagatgaataattgcagaaaattaggcccagatttattctaaagttttcaagaattcataatgtcccactccagttttggattcatgttaaatacatgtcttacaaacattcacactatattctttttaaattatacaaatgtaagtatttaataaaatgcaaattctctcaaagagttattgactccacagaagacttttgagagtcaatgtctattgttactatcaactgacactgaaagttcaatttctttcattcatatggtagtccataattctgatatgaaagttggaaatcagggatgaaaaatcacttttttttttggttgttgttacagagtctcgctctgtcgcccaggctggagtgcagtggtgtgaattcggctcactgcaagctccgcctccctggttcaaacaattctctgcttcagcttcccgagtagctgggattacaggcacccaccaccacacccagctaatttttgtatttttagtagagacagggtttcaccatgttggccaggctggtcttgaactcctgacctcgtgatccacccacctcggcctcccaaagtgctgggattacaggcgtgagccactgcgcccagcctgagagatcatgttttttataagaacatatacatgtatagatatgcaaataccttcttaaagcacagataagtggtatccattatttttttcttgatcaacatgacattttgcttcaactcaaaagaaaattacattgatctgacaatttcttttcacaaggtcatagtaattttattctatgctattctaggtgactattaattttaatatatgtgtgactttttgttgtttttgttttgtttttattgaaatttgaagatactgagttaagatgaaagtcctaaagttcttcaatcacttttctgaaatctagacctccaaatttgccctttcataaagtttaccactagacttaacaaaacactctaagtgttcaccattagtgatgtaaatctaaaatactatatacttctttcttctttgtgtgtgttttttttgtttttgtttttgtgtttttggagacggggtcaggctctgttgcccgggctgtagtgcagtggcatgatcgcggctcactgcaacctaactctcccaggttcaagcaattctcctggcttagcctcccaagtagctgggactacaggtgcatgccaccacacctggctaattttttgtattttagtagacacagggttccaccatgtcacccaggctggtcttgaactcgtgagctcaagcaatctgcccgccttggccttccaatgttttcttttttaacaatttacaaatgtacagtgattacacttcgtttctatttttgaaacttttttcaccttccttcctagaaggggaaacctattaatagttctagaaatctcaatgcctacctcatcctttagtctttattaatttgttttttctaaatgccagggtttgaaaatcagataaacaccatctctagagatctgctatatgtttaaaaaaatgcttatacgtgagattatctagacttcactttgaaataagagatataaaattatatttggtatgttcaaaggtacttgtattcaattaaaaaaaaatagggtcttgccctgtcacccaggctggcgtgcagtggcatgatcatagctcactgcagccttgaactactgggctcaagtgatcccttcctcagcctcctcagtagcttggagtacagatgtgtatcacctgaccagctaatttttaaaaatattttgtagggacagggtctcactttgctgcctaggtggatcttgaactactagcttcaagcaatccttccaccttggtctcccaaatttctgggattacaggcatgagctatcacacctagcctctatttgaagttgtattctagagtcttgtagaattagaaaacttttatctagataaatagaggtcattgtagaaatatttgtatgcaatctgccttgtttggatgaagttttcttctcttgcatttgtaacaattcacaagaaatatctatctgtctatcaaaatctggcagagacacaatgaaaaaagaaaactttaagctaacatccctgatgaatatagacacaaaaatcctcaacaaaatactagcaaattgaacccagcagcacatccaaaaagctaatccaccatgatcaagtaggctttattcctaggatgcaaggttggttcaacatatacatatcaatagatgtgattcatcacataaacagaactaaaaacaaaaaaccacatgatcatcttaattaagatgcggaaaaggctttcaataaaattcaacatctcttcatgttaaaaaccctcaacaaattaggccaaagcataagagccatctataaccaactcacagccaacatcatactgaggaggcaaaagatgaaagcattctccctaagaactgaaacgaaacaagggtgctcactcttaccactcctactcaacataatgctggaagtcctagccagagcaaccaggcaggagaaagaaataaaaggcatccaaatacgaagagaggaagtcaaactatctctctttgaaaatgatatgattttatacctagaaaacaaaaccccacagtctcttcccaaaggctcctagatcaaataaacaacttcaggaaagtttcaggatgaaaaattaatgtacaaaaatcagtagcatttccatacaccaataacatccaagctgagagccaagtcaataatgcaatctcattcacgatagccacgaaaagtataaaatacctagtaacacagctaaccagggagatgaaagatctctacaacaagaattatgaaacactgatgaaagaaatcagagatggcacacacaaatagaaaaacattccatgctcatgggtaggaagaattaatattgttaaaatgactatgccacccaaagcaatttacagattcaatgctatttctatcaaactaccaatgtcatttttcacagaattagaaaaactatttgaaaattcatataaaacccaaaaagatcctgactagccaaagcaatcctaaacaaaaagaacaatgtctgaggcatcacaccacccaactataatacaagtctacagtaaccaaaacagcatagtactggcacaaaaacagcttatccaccacaatcaagtgggcttcatccctgggatgcaaggctggttcaatatacgcaaatcaataaatgtaatccagcatataaacagagccaaagacaaaaaccacatgattatctcaatagatgcagaaaaagcctttgacaaaattcaacaacccttcatgctaaaaactctcaataaattaggtattgatgggacgtatctcaaaataataagagctatctatgacaaacccacagccaatatcatactgaatgggcaaaaactggaagcattccctttgaaaacgggcacaaggcagggatgccctctctcaccactcctattcaacatagtgttggaagttctggccagggcaattaggcaggagaaggaaataaagggtattcaattaggaaaagaggaagtcaaattgtccctgtttgcagacgacatgattgtatatctagaaaaccccattgtctcagcccaaaatctccttaagctgataagcaacttcagcaaagtctcaggatacaaaatcaatgtacaaaaatcacaagcattcttatacaccaacaacagacaaacagagagccaaatcatgagtgaactcccattcacaattgcttcaaagagaataaaatacctaggaatccaacttacaagggatgtgaaggacctcttcaaggagaactacaaaccactgctcaaggaaataaaagaggatacaaacaaatggaagaacattccatgctcatgggtgggaagaatcaatatcgtgaaaatggccatactgcccaaggtaatttacagattcaatgccatccccatcaagctaccaatgcctttcttcacagaattggaaaaaactactttaaagttcatatggaaccaaaaaagagcccgcatcgccaaggcaatcctaagccaaaagaacaaagctggaggcatcacactacctgacttcaaactatactacaaggctacagtaacccaaacagcatggtactggtaccaaaacagagatatagatcaatggaacagaacagagccctcagaaataacgccacatatctacaaccatctgatctttgacaaacctgagaaaaacaagcaatggggaaaggattccctatttaataaatggtgctgggaaaactggctagccatatgtagaaagctgaaactggatcccttccttacaccttatacaaaaatcaattcaagatggattaaagatttaaacgttagacctaaaaccataaaaaccctagaagaaaacctaggcattaccattcaggacataggcatgggcaaggacctcatgtccaaaacaccaaaagcaatggcaacaaaagacaaaattgacaaatgggatctaattaaactaaagagcttctgcacagcaaaagaactaccatcagagtgaacaggcaacctacaaaatgggagaaaattttcacaacctactcatctgacaaagggctaatatccagaatctacaatgaactcaaacaaatttacaagaaaaaaacaaccccatcaaaaagtgggcaaaggacatgaacagacacttctcaaaagaagacatttatgcagccaaaaaacacatgaaaaaatgctcatcatcactggccatcagagaaatgcaaatcaaaaccacaatgagataccatctcacaccagttagaatggcaatcattaaaaagtcaggaaacaacaggtgctggagaggatgtggagaaataggaacacttttacactgttggtgggactgtaaactagttcaaccattgtggaagtcagtgtggcgattcctcagggatctagaactagaaataccatttgacccagccatcccattactgggtatatacccaaaggactataaatcatgctgctataaagacacatgcacacgtatgtttattgcggcattattcacaatagcaaagacttggaaccaacccaaatgtccaacaatgatagactggattaagaaaatgtggcacatatacactatggaatactatgcagccataaaaaatgatgagttcatgtcctttgtagggacatggatgcaattggaaatcatcattctctgtaaactatcgcaagaacaaaaaaccaaacaccgcatattctcactcataggtgggaattgaacaatgagatcacatggacacaggaaggggaatatcacactctggggactgtggtggggtggggggaggggggagggatagcattgggagatatacctaatgctggatgacgagttagtgggtgcagcgcaccagcatggcacatgtatacatatgtaactaacctgcacaatgtgcacatgtaccctaaaacttaaagtataattaaaaaaaaaaaaaaacagacacatagaccaatgaaacagaagagagaacccagaaataaagtcacacacatacgacgttctgatcttgaacacaatcgataatagcaagcaaggcagaaaagactccctgttaaataaactgtgctgggataactggctaaccatacgcagaagattgaaactggaccccttcctttcaccatatacaaaaatcagttcaagatggattaaagacttaaatgtaagacctaaaactctaaaccctagaagaaaactaagaaatacctcgattaaggccttggcaaagatttcatgacaaagtctccaaaagcaattgcaacaaaaccaaaaatagacaagtgggacctaattaaaataaagagcatctgcacaacaaaaacaaaactatcaatagagtaaacagacaaccagcagaatgggagaaaatatttgcaaaccatgcatatgatgaaggtctaatatccagtatctataaggaacttacataaatcaacaagtgaaaaacaaccccatttaaaaatgggcaaagaattaaaaagacagttctcaaaagaatacatacacgtgaccaacaagcatatgaaaaaatgctcaacatcatgaatcattagagaaatgaaaatcaaaaccacaatgagataccatctcacaccagtcagaatgacaatttttaaaaagtcatgggcggggcgcggtgactcgcgcctgcaatcccagcactttgggaggttgaggcgggcggatcacgaggtcaggatatcgagaccatcctgactaacacggtgaaaccccatttctactaaaaatacaaaaaattagccgggtgtggtggtgggcgcctgtagtcccagctactcaggaggctgaggcaggagaatggcgtgaacccaggaggcggagcttggagtgagccgagatcgctccacagcactccattccagcctgggcgacagagtaagattacatctcaaaaaaaaaaaaaagaaaaaaaagaaaaaaaaaaagtcagaaaataacagatgttggcaaggttgtggggaaaagggaacacttatacactggtggtgagaatggatattagttcagccactgtggaaggcagtttgaagatttctcagaataaatgaaaacagaactaccatttgacccagcaatcccaatactgggtatatatccaaaggactataaatcattctaccaaaaagacacatgcacgcatatgttcattgcagcactattcacaatagcaatggcatgcaatcaacctagatgtccattaatggctgactggataaagaaaatgtggtacatatatgctagggaacattacacagccataaataagaacaaaagcatgtcctttgaagcaacatgggtgcttcagagaaaataccattcaacaaagtttcagtaatattcgagctattttgtggataatgcacaacttttgtaccttaaggcattgttcaattctgtttaagaataaattgtttttgagctgcctattagatttcaagcctgactttagatttgggagatatatatatatatatatgacggtttctgttctagaggagcagacagtctgttaggccagacacagttgaatagcaatatattataatattgaggaagtaggctgggcgcggtggctcacgcctgtaatcccagcactttgggaagccaaggagggcggatcacctgaggccaggagctcaagaccagtctggccaacatggcaaaacctggtctttactgaaaacacaaaatttagccgggcatggtggcaggcacctgtggtcccagctactcgggagactgaggcaggagaatcacttgaacccgggaggtggaggttgcagtgagccgagttcgcaccgctgcactccagcctgggtgacaaagcaagactctgtcttaaataaataaataaataaataaataaataaataaataaataaatactgaggaagtataacaataagttatctttgagacacggaggaagcacagaagaggatataatcacttcttttgggatatgaggagggggaaaaatgttaagagaagcttcctaagtaggtgagagctgaaatgggttttgtaaaataaaaggaaattcaccaggaagataaaggtaaaggactgaggacatgtgaggcatgtaaaattaatatgatcttttagtcacttagaaaaaataccataaagaacactaatagtgtttaaaagcatctacccagtgccaagaactgcattatgtattggtgaacataactttagactttaccatacaacgtgaaaatatatattattatcactattttacagatgaagcaataaaagtcagaaaaaatgtagctaattaaagtgatactgtgtatagctagagcagtgtatagctagagctgatttgtctgactctagccctagtttctttccattatatcaatttcctggaaatgtatctctgttcatggcatagtgcctgacactatgcttattaatatcttttgaataaaagaaccactgagtgatttgaaataaaactaaatttagttagttaattttattggtggtatatagagatagtaggaaaaataattgaaaagagacataaacagatttgccaatactttctaagaaaaattatggaactagagtttagtcaaaatgaatgctttcattgttagaattcaactttaatctttgcagaatacaaacaaagacccattttctagaagaagtaacagggaagagagagtaagaaagagataatgatgaacattgtctaatgttacagcataatctagtaaggtaagaacagaagagagttcattgacttaccaacatagttgtccctaatcacctctgtgaacctagagtgctacgatataataatgattgtggtggtttaaaaagtaaatggggctgggcatggtggctcacatctgtaatcccatcactttggaaggctgaggcaggtgtattgcttgagctcacaagctcgacaccagcctgggcaacatggcaaaaccccgtctctacaaaaaatacaaaaattaaccaggcatggtggtgcgtttgtgtagttccagctacttggaaggctgaggtggggggattgcttgagcctgggaagtggaggctgcatgagccaaggtggcaccactgcactccaacctgcgtgacagagccagatcttgtctcaaaaaaataaaaaaattaaggtacattttatatatgagactatgagaccgccaaatgatatttctcagccaacagccttcacagacatttgtcttagagccgatttggctactttgtgttgccagtatgctgttgtaagaaagcacaggaatgcttgtaaagaagaaaagaattggtatcatggtcctgaaaaaagttatttcctcaaggaataaaaatagcaaaagaaatgacgtaatttctcagcttctgatatgtttcaaataacctcagtgaagtcctaggggaaatagcttatatcatatgtcttactccttaggatttttgctatagaggaaaaagtgtgaagttttcttaatttaatgttttatacatatttgcttgctgtacctggaccttacaaagtggatactctttagaaagtgatgaatattttcacttttaaaaggtttcagagtttaaaaaggttaaaaagaatcattcataaaagtttaaaaacaacttcatcaagggtttcccttttgccaagttataagtttaaaatgagagaatgaatttggttattaacagggttaccaccaggcctgaatgtaaattaaacctttgccaatagaagtgaaacagaaagaatcaaccaacaattttatgaattacagacctcatacacattaaaacttctacatatgtagttatgcttcagtgaaaccctttacattgtagttatgcttcagtgaaaccctttatattaaaataatcatcacgtatttgaccatatgaaaatagtttacatctaccacatttggtttatcttggccaaaaacaattaatccttagaaaatctactatatgaataactcaataataatcaaagcatttgaattagaaataggatcaaacacacttttttgaatgaatgcctaatttttatttctcagtggaaatgctagagcatatccaatattcactagtgaaaaaggctattttccatgaagcccatgagaagatgacataagttaaacttgtccaattccttttcagggatagcatcaagaaattgtctttacccctataaactgaagcatttgaaaatcagtaatattaactgagcaaaataacttgtggcaacaggtatcagtctgggacacaatcaagatacagaaaccgggccgggcgcggtggctcacgcctgtaatcccagcactttgggaggccgaggcgggtggatcacgaggtcaggagatcgagaccatcctggctaacacggtgaaaacccgtctctactaaaaatacaaaaaatgagccgggctgggtggcaagtgcctgtagtcccagctactcaggaggctaaggcaggagaatggcgtgaacctggaaagcggagcttgcagtgagcccagattgcgccactgtgctccagcctgggcgatagagcgagactccgtctcaaaacaaaaacaaaaacaaacaaaaaaagatacagaaaccacatgctaatttaaacagagaaagtttaatatatgaagaattattaagtactgataggagagtaaccataaagatgtaagagaatctaaagggtatcctggagctaaggtagaggactcaaagaagagtgaactggaaggatttcccatcccaaggttggggtccaaacttcattgggaaaagtgtggtggaagccctctttctctacagcagaatagtttgctggggtgtcctggccggagctctggtccacagttgggctactgttgggcaagcagaaacaattctttagggcacaggtgagctaaggttggtgggtgggccttcagaaggagtgcggcactgaagtgaggatgtgtctgtgttggcagtgtgcggtgtcagtgctgggagaactgtggcaaagtggtcactaggcccttatatagaggctgtgaagtcaccaacagactgccccatctgggcatgtggctggggaaaaacaccaccagatgtcattacacaagcacgttgccaatggtccattgctaatggtccacattgctaatgatcgaagtaaaatcaaaatgtagcattagaaccaggaagagaagccccttcctcctgcagtgacccttcactgccctctactgacaaagagtaacgttatgctcacggtctaagaaaaatgctttaagtgcccaatacactatttctggttagctaccaaagagagctaagaggcaatacactggtaactgtcatgtcttgtacatgaatatcattattcatgtttttttaaaatcacagactatacttcttaacagctacatacattttatttatattcatcagaaacttactgcttattctttgcccttaactacttgtatagaccaacatggaaccaaatttgctgtcatataggctgttgatctcttcatccactagcacttttctgaaacaaaaagcaagtaatcttcgaattcacataagcatttatctgcaactctggtgttacttgacgactgacttctacctcccagtatatttgcttgtgaatatgtcttgttttttgctttagtccataagcaccttgagagcagcatttacctttgcattcttcactgtatcgtgcaaagtactttacccataacagtcacacaatagttgctgaattaattaataaaatatttggaataacaacacctaagagtgagaggttacaaaacacgatagttcaaaattcaacagttataaaaaaaaatcaaaagttaaaatacagaatatgttacagtattgaacattgtatggtaaatgtaatttactggaaagtatgaattttatagtgatcacatacttttcttaatatttagatatctgacacatgtaaagtagcaatagttcttattctgaaccattcttgaataaataagaagagaacacaacttggctaacaatttttatcaattcagctttgggtgctaacataatttaattgggaaagaataatcatttcagcaactagtactagaaaaaccagatatccacatgcaaaaggaaggatttgaaactgtggataacaatgtacaaagattaattcaaaattaatcataaatttaaacgtaagaactaaaactataattctttaaaaatatgagtaaatatggtgcacatacataaggtaataatttcttggctgcaacaccaaatgcataagtggtcaaaagagaacattgataaattgtacttcataaaaaatcatttgcccttcaaaagacaacatcaaaaaatgaagacaacccacagattgaaagaacgtatttgcaaatcatatatctgataagcgattgtatctggcatatatatatatattttaaaactcttacaagtcaataataaaaaaccccaaagaacctaactataaaaataggcagaagatttgggtagatacttgtccaaagaagataaatgactaatcaacgagcacatcagatgctcaacatcattaatcatgaaggaaatgcaaataaaaaacccaatgagacatcacgtcacacacactggaatgactataataataataaaaaaaacagataatcacaagtgttgggaaggatatagagaaactggaaccctcatatattgttagtaggaatgtaaaatggtacagccatttggaaatacactggcagtgtcttacaatgttaaacatagattcattatatgacccagtaatttcattcctaggtatctaatcaaggtaaatgaaaacatgtatccatatgaagacttatatggacatgttcatagcagccttattaacaatagcccaaaagtggaaagcacccaaatgtccattagctggtaaatggataaacaaaatgtggtatatccatataagggagtatgattggtcaattaaaatgaatgaatactgaaacatgctgttaggtgagtgaatctcaaagatattatgttaagtgaaagaagaaagtcacaaaagatgacacattgcatgattctattcatataaaatgtctagaataagcaaatgtacagagacagcaaatagtgattgcctaggactgggagtgggaatagagagtgactacaagtgggcatcaagtttctttttagctcaatggaaatgttctaaaatgagattgtaatgattgctgcacaactctataaatatacaaaaaagcactgaactaacaaggagctaaaactacaatgataatcatgtaagcagtgataattatttgattcccttctttttctgtttgaatcagaatgccttgacaattttttattcttttctcttctataggatttcaaggagtttagaactttacagaaataataacaaaaattacagcatttgattaataaatacatcttttagtaattttctttttgcctaaagtcaagaataattgttcatcttagtatgtttattaactactcttggtgttatgttgggcgttataataaagaaaaatctttgtttcaaaatttaggttggaattttggatcctactctgactaactaggtacactactgaatttacatcaagataacagtacagatagataagaacattgatttccttaagatcagtaatttgaagcttaaacatagtatgcaacacattgagagtctcaaagaagtaacaagtgccatctttagaaaatattttatatacttggtgtggtcttatcataagaagtatatacatacataccttgacatattgtactttgctttattgtgcttcacagatacagtttttcacaaattgaaagtttgtggcaaccctacatccagcaagtcaattttggtgccatttttccaacagcatgtgctcacttcgtgtatctgtgtcacattttggtaattcttgcaatatttcaaactttttcactattattatatctgttatggtgacctgtgatcagtaatatttaatgtcactttagtaattgcttggggatggcaagaactgcacccaaataagagtgaacttaattggtgttacgtctgctctgactgctccaccaacatgctgttcccgtctctcttcctctccttgggcttcccagttccttgagacacaagaatattgaaattattccaatcaataaccctactatgtgggtggtggggaggtgggaatgattaatgggtataaaaatgtagttagatagaataagatccagaaatgtagttaaatagaataagatctagtaacacaacagttatcacagtcaacaataatttattctatattgaaaaatagctaaaagagtataattggaatgtttgtaacacaaagtaatgataaatgcttgaggggacacataccccatttactctcatgtgattattgcatatgatacgcctgtatcaaaacatctcatgtaacccataaaggtatacacctactatgtagccatacaaataaaaaaaatttttttttaatccctacaatggcctttaagtgttcaagtcaaaggaagaattgaatgtttctcactttaaattaaaagctagaaataattaagctttgtgaggaagacatgttgaaacctagataggccaaatgctaggcctcatgaaccaaacagttagccgagttgtgaatgaaaaagaaatattcttaaatattcttgaaggaaattaaaagtgctactccagtgaacacaaaaatgataagaaagtaaaatggctttattgctgatatgaagaaagtctgaacaaaagattgaaccagccataacattcccttgagccaaagcctaattcagagcaaggctctaactctcttgaactctgtgaaggctgagagaggtaagaaagctacagaagaaaagtttgaagttagcagagtttggtttatgaggtttaaggaaagaagctgcctccataaaattaaagtgcaaggttaagcagtaggtactggtgtagaagctgcagcaagttatccagaagatctagctaagatcattgatatggtttggctatgtccccacccaaatctcatcttgaattgtagctcccataattcccacatgtcatgggaggaacccagtgggaggtaattgaatcatgggggcaggtccttctcatgctgatcttgtggtagtgaataagtctcaggagatctgatggttttataaaggggagttgctctacacaaactttctttgcctgccaccatgtaaaacatccctttgctcctccttcatcttccaccatgattgtttgaggcctccctagccatgtggaactgtgagtccgttaaactgctttcctttataaattagccagtctcgggtatgtctttattagtagggtgagaacagactaatacaatcattgatgaaggtgactacactaaacaacagattttcaatatagatgaaacagccttatattaaaagaagatgccatctaggactttcatagctagagaggagaagtcaatgcttggctttaaagcttcacagaataggttcagtctcttgttaggagctaatgtcaccagtgactttaagttgaagccaattttcatttactagtcaaaaaaatcctagggcccttaagaagtatgctaaatatactctgcctgtgctctataagtagaacagcaaagcctgaatggcagcacatctgtttacagcatgctttattgaatgttttaagcctgctattgagacctactgctcagaaaaaaaaaaaagattccattcaaaatattaccgctgactgacaatgttgcaaagagctctgatggagatgtacaaggagattaatgttattttcatgcctgatagcacaacacgcactctgcagctcatggattgaggaataatttttattttcaagtcttattatttaagacatacattttataagactatagctgctatagagagtgattcctctgatggatctgagcaaagtaaattgaaaatcatctggataaaattcaccatcctagatcccattaagaacatttgtaattcatgggaggaggtaaaaatatccatatgaacaggagtttggaagaaatcgattccaactttcatggatgactttgaggggtacaagattcagtggaagaagtaactgtaaatgtggcagaaatagcaagagaactagaattagaatgcagcctgaagatgtgactgaattgctgcaatgtcatgataaaaccttaagagaggaggagttgcttcttatagacgagcaaagaaagtgatttcttgaaatagaacctactcctggtgaagatgctgaggacattgttgaaatgacaaaaaaggatttagatattacataaatttatttgataaagcagtggcagggcttgaaagcattgactccaattttgaaacaagttatactgtgggtaaaatgctatcaaacagcatcacatgctacagaggaatcttttgtgaaaggaagatcaatcaacgtggcaaacttcattgttgttttattgtaagaaattgtcacagtcatctcaaccttcagcaactaccaccctgatcagtcagcatccatcaacatcaaagcgagactctccaccagcaaaaagattatatgactcactgaaggctcagatgactgttagcattttttagcaataaagcatttttaaattaaggtatgcactttttttcaacataatactatcacatacctaatagactatagtatggtgtaaacataacttttatatgcactgggaaatcaaaacacttgtgtgactcactttattgcaatattggcttttttgtggtgggctggaaccaaatgtgtaatatctctgaggtgtgcctgtatttggtcttagttcttgctgcctggcacagagctcctataacccttgttatttcctgattaatattggtgatagcagcatctttcttatatttggccttagttccattttctgacataagagcttctataatctttagaatctctggagtgcctttttgtatgctaatgagatgacaagtggctgagggcccctacatagcttcaggattgaggctagtcactagaaagacctgcatctgcaagggatgggctaggggttgaagattaagctaatcaccaatggtcaatgatttaatcaattatgcctacataatgagacctccataaaaactctaaattatggagtttggatagcttctcctaccctatactttctgctatatgtctcttccaggctgttcctttacaataaactggaaatagtaagctcttaaattctgtgagctgttgtagcacattattgaactggaggatttatagctggtcagtcagaagttccagaggcctgggtcttgcaactgatgtttgaagtggggcagttttgtgagactgagccattgacttgtggtatctgaggataatgccaagttattattgaattgaattgtgggacactcaactggctgtcagacaattgagtggtgagggaaaaacagaaacaaaaacaaaaacaaaacgacccacatatttgatgtcagaagtggtgtggttaaaacagtagtacttggcttttttttaaatttagaatctaagtacttaagagtagatatcttggcacctagtattaaatatactaggttctcaatacatattgttaaatgaatgactagtaaatgaaaaaagaatgagaaaattatttcttgctctgaccaacttcctgactgttttactctaagtcccaataaatatgaatattaccataatagctaaaagaatgctattgattaaaatgtttcctgtcatttgtcttttagcttgaacaaccgatatatatactaatcataaatataaaataacaggtgtgctataattttaaacagctacttttaaagttttgaaattgtagattaccctctgagaattagatgcatacaccaaggttattgctagagggcaagaattactacactttaagataaaacacaatggagacttggaagggtagtaggtgcaaggtgggtggatgataggaggttgcttggtggatacaatgcacattgctccagtgatggatgcactgaaggccgtaacttcaccaaaatgcaatatatcaatgtagcaaaattgcacttgtaccccacaaatatacaaaaatttttaaaattgataaaataataattaaaattgtttttcacactctaatgttaccttggtttgagatataatgtgatccttggatctcatggagaatattaataattctctttcttagataataacaaacctgtaactattcatatttgaaaaataaataagaactttaaaactgttaccacttccttacctcccttccagctatcatattatttagtatgctcatcaaagacagattttaatgtatattttaaatttcttaaaaagtttgtatcaagaactctaagaagaaagttgttttctgctgtaaagtggtagaaaaatcagaaattagttaaacaatgcaatgattttcagagagttgttcaatgttaatatataaattattttgtgcctgtttctgaaagcaggaaaacatctgagagtattaaagaactagcccaaatgggttcattttgaacaaatgatgagagaaggagagagtgaatgaaagtagtgagccaagctctttgtgtgattcctactcccagtgaggaccagaagggagaatcaaaaagaaagagaacaagcccagtgcaagaaaccatgcactggaattgtttccttcagatttaagtgttaattgactatatcttgtgtgtactgcatggactttgttggccttctgttttccttaatcaagaaaaccctaagttttgggatctgtttatacaacagatgatcttttggctattaataaaaatgtaaaattcttggtatttttaatgtgttatttaaatttacttcaaaagtaatgatgcaactaaaatgaaataaaatttccatgattatcagaataattaaataaatgtaaaactacaaggaaatattatgaagccattaatattatacttttgaactattctgatggcattaaaaaatgtttaagatgtaatatgtgctacaaaattgaaaacaccataggaatcccattattcaaacaggaagagaaatggtttagagcaaaatattaacatgttaaaagcaatattttattattgtggggaaaatcacatagattatgagatcacaaatattattttcttctttatgcttttctaaatattctgttttctataatatcaatgcattccataactataaaatatagtacttgaataatttgctaataattagactcaagcaaagaccaaagaatgcctcaaaatgagctaggcacggtagctcacgcctgtaactttggaaggtcgaaacaggtggatcacctgaggtcaggagttcaagaccagcctggtcaacatgatgaaaccccatctctactaaaaatacaaaaaattagctgggcatggtggcgcatgcttgtagtccccgccacttggggggctgagacaggagaattgcttgaacccaggaagtggaggttgcagtgagccgagattgcttcattgcactccagcagcctgggaaacaagagcgaaactccgtctaaaacaaacaaacaaaaaagaatacctcaaaatgataaaaggagaagtaatcaaatttctcagacactgaataagtaaaaacagctaacagtaataatttgaagaaaaaatgcattcagaattactttgaaaagcagtgcttaatcatagtatatataagtagttcaatactcatagtatatatgagtttagaataggagtttgggacttgcataagaaataaaagaattatttaaattattatatgcttcaagcatatttctacaaaaacagtatttgcgaaagcatcctataaaatgtaaaactgtcaggtattaatattaaaggtaaccctaaaaatgtttttgttttgtttcattttcatttaacaatttctattgagaacctagacaccgaaaacggaagtaggcagtggcaatgagacttagtcacatcagacaatatgctgcaccatattgcaaagaaggtacagtatagcagaggaagacaggggaataagcacaataaagtgcagtgggagagatgatagaaatgtatacaggacctaggcacaacacaaaaggaaattaatcatacttggggaagaagaggtcgtggctattcaccaaataaagaagcagtagcaaagacctagagatagaaacagctttaggtcttcacagaaatgcaattagttctttctgaaggactaatggtaaggtagatcgaccatggggtaagaaataaacctggacagctcatgaaagccagccatgctgaataactgaatagcttttactccaggatataacttacagtcttaaaaagtagagatgtggcccacatgtttgaaaggtcactggtggtagtatggagatcaggttctaattgagggaagggagtgggtgaacatttagaaaaagaccaatagaaacttcttacattggtttaggtgaggaaagatgaaagtcctaacaagagtattagaacatttatattttataatcctctgatttgctttgcaacaatttttactcactttatacagaacttactgaactaaactgatatgtgcagctcatattacagtaatgaaaaatgtactaacttgtgtaatgtgacaaatatcttctctatcctgcataattctgggggactcaattatctgcattataataatctcaactaatacagtgcaacaaacttaatctgaataatttatcagataatctgataattcatcagattcagtgtcccagaatctgatgaattatcaaattcatcagattcagtgtcccagaatctgatgaattatcaaattcatccttgtcataatttttttgtctcaagactccttttgattgttaatattattgaggaaacaaaaaattcttctttataatgagttcaatgtattgccatttaccatgttagaaagcagaaaaatcacaagcacatcaattaataaatttataaattataatcataaatcacatgtcaacaaaataaatttcaagtgaaaataaccatatttctaaaagaaaaagatctaatgggatgagtgcttggctaagttatgcaggtcttcaaaatattggaagatttcattattcatctgttaatattaccactaatcacatcagaaaccctgtaagttttgagaagctgttgagctcatggtggcagatgcatctttttcaaaataataattttctcttgaaaggccaaattttgtcactgacaacaaatattgtcaaatgtatttttaaaatgacagtctccatttattttcaaaaatttgtcttttcaatatctgtttgaataatcacaatttgtctctcagtcattttttcaaataaaaatagtattctatggaagtacagctagtttagcttgcaactcaaacaactacacaagtgctttaccttaagacaaccagcattattgttgatatacagcagatgttaatcatgtatactttccatttcttcatgtatactgaatattaaaaatatgtgtacttaatggtatagattaaataaaattaatttctagtgtttcgtcaaagacattcttttagtgcaactggctttaattttattcatttatttatttacttatttttactgggaatgaattacagtgaagaatacaatgacagtatagtttgttgtcactgtcttgataagtgttaaggctaggggtttcattgttcttccaaatgtcaacacagtgaaaaaggtaaataatgtttttgtatcattatgaaaatagtttggacctgatgaatcatttaaaaagtctcaagggaatgcaagagcatctgtggaccacattttgaaaataactgctaaaatcacattaagaattttttggccgggcacggaggttcatgcctgtaatcccagcactttgggaggccaaggcaggcggatcacgagatcaggagttcagcctggccaacatagaaaaattagctgggtgtggtagtgtgcgcctgtaatcccagctactcaggaggctgaggcaggagaatcgcttgaacccaggaggcggagattgcagtgagccgagatcctgccattgcactccagcctgggcaatagagtgagactctgtctcaaaaaaaaaaattttttttttgattttttggattatattctatatgcattaaagactatgaacattctgagaacatgactgtgaaaagttttttttatatgttactgaatggaaggagggttagaaatcagcagagtatgcaaaaacagagtaaaacaaaatgcctaggaatgaaaaaaaaaagagagagagagagagagagtcagggagagtaagataaagtttggtcccagagaagatacagtcaagattccactttttgctattccacagagatttcaggaagaaaaatcacactcctattttctttttctttgcttactgatttctatttagtttcttttttttttttttttttttttttttttgagaaagcgtctcactctcttgcgcaggctggagtgcagtggctagattcttcttgagtatgctcaaacttcctttttggaatgtcttccaaaggcactcttgccttcatttgtacaagttgattgaccctttaaaggccttaaatattattgtgcgacctcacagactcctcaaatcacctgaaacctgaaatgctgaggcccaggtggcactgaaatgatggtattctagacctgacaccggactgttttctccttggttttgtcccaacacactgacatacatagcccaaaatactactggcctttttaagtggcatatcacattccagggtaatatcaaaactgctgcctggtagcatttgtgaagtctcaaagtaactctttccaggattttcaaatccactgaatttcttagattgaaatatgtatgtgacagaattctcttagctttctttcctctatgaatatgtaattggaaactctgagatccggtttctcatctttattggattttttctttaatcttaaaattatgaatatttgctttacaataatctagataaggagtccccaacctttttggcaccagggactggttttgtggaagacagttgttccacggacattgtggggagtgggggctggcattagaatctcataaggagcacacaacctagatcctgtgcatgcacagttcacaatagggtttgtgctcctatgagaatctaatgccgccactgatctgacaggaggcggagctcaggctgtaatgctccctggcccactgctcacctcctactgtgcgacccagttcctaacaggccagggaccagtactggtccgtggcccagggtttggggacccttaatctgatgttactaagttacatcattaataatctatttctcctcacacagatttctttcctcacatcctcaacacatataatttcacatctccaaatgcagcattccctaataattacccttcttactccattctgccacctctggctcattttcacttgccattccatttgataatctagtaacttcattttgccaacttgatgaatttggttctaagtagtttaaaaatttaaggacatactatgtcagtatttacaggtgcttcttatttattcttcagtattctcaaatgttcaatttgaggtcaagttttgctaaaaacaactcattgcaaatagtagatgttttataaatataagataaatttcttaaaattcgtgctgagttctaaagagaaaacttaggttaccaagtaacatgattttcagaacaccaccaatttgctatttcaagtctaattttatattagaccgattcccaaagcttttccattgttacaaaattttcaaaatactgtacttttattatacaaggtttgtggcctagttttattaatattccaaaagacaaaatattcaaacattcaattgtttcatcaataatttaaactaaatttactattttgattaaagatacaatgagtatctttgcatgaaatagattactaaattctatttgaaaactaatgtacacttttattctagtttttaaggcaacatatgtttattttgaactttattttaagaaaacataccaaaacaatgccaaattgtttggtaagaaacaataccaaagcatttgaaaaaataaattattaacaataataattttgttgtgtaaaattgtgagttatttcatcattttattaatttatatttcccttttgctttatgtattacttttgctttatgtattacttttgtcataagaaaaataagatgtaatattctatttaaattttttttttgttttatgcactttatgttccttttttatgtactttatgttccttttcctttatgtattacttttattataagaaaaaataagatgtaatattctatttttaaaacaaaaactttataaagaagaaaacagaaatcctaattctataaaccagagataactattatattatcttcagggctttttctaaggaaaaacatgtttgttttttttccgtaattggggccatcctagatatatatgtttgtaaggtactttttaatatactattataacctgggcaattttatatagaattaaatattcattgaaacattatgtttaatggtactataatatttcatcatttgcctagactatgatttatttagccattctttcaaccttccagcattgtgtatgtagactgttttcttttttcttttctcttttttttttttttttttttttttttttgagacagagtcttgctctgtcatccagacgccaggccggagtgcagtggcatgatctcggcttgctgcaacctccacctcccgggttcaagtgactctcctggctcagcctcctgagtagctgggactgcaggtgcacaccaccatgcctggctaatttttttgtatttttagtagagacggggtttcaccatgttggccaggctggtcccaaactcctgacctcaggtgatctgcccaccttggccttccaaagtgctggaattacaggtttgagccactgtatctggcctatgtagactattaatctctccaattttgtttgggttgaattagttttcctatatggggatagtttggtggaaatgtcagtcaaggaactgttagttaagtttactcttaactaaaaggatcagattcatgacccaaacttgaccaaccagatgtttacttcctggaattttggtgttaaacatgaatgtcaggaaaaaaaagaaaaaaaaaaaaaaagaaaaagaaagaaagacaaagagcctgaaagcagttgagctgattcattctagattacagcaccttacagaaaccaccaaaagtctaccaactgggctatctgctcttatagttttctctgctcctggcatttttcagtctagattgtagctatcccttaactctgtgaactataatatcttttgaagacattgcttttatacttaaattaacctgagtcagtttcagttacttattgtaatactttaatttttttttaccaattccccatgaattcctaattttatatccttttctgtcactttcctcactgaaataaatgagcatcttaattcttatcacagatcatgaatgtaaatgtgacattataggcacagcagtggaatcagtgtcaccatcattttatttctgcccccactttgttagtcatcatgcctgtaattacaaacctaattaattgcctttattagaatcttaacacatacacagataactcattattatccagtaggaggagggtatgaataatgaaaatccatcatttataaaataaccacaacagtttcatcaacaacaaaaaaatatcaatttaaccttctttgcttatgattttagtagtcataagtattgccagagacaactgttagaggctgaattgtatcctccccaaatccatatgttggagtctcaaactccggtacctcagaatgtgactgtgttaggagttagagcctttgaagaagtggtttagtgaaatgagacttttagggtgaaccacaatccaatatgacttgtgtccttaaaagaagatgaaatttagacagaaaagagacaccaggaatgcacatgcacagaggaaaagacagacatcagcaagccaaggagacgggctttagaagacaccaaacttcccagtaccttgttcttggacttcgagcctccagaactgtgataaatactgttatttaagccaccctgtctgtggtactttgtcatggtagcccaagttaactaatacagaaaccaaccctatttgaatggcacacctctatctcaagttcagtagtttccccaatggtatctgtgaaacaaaagcatactagcaacatatattacaaagaacatggataatatttgtgtaactttgggaaagcatgtgcaatacagtaaatatgtttctttggaataaatataacctttccctggaaatatttgctcattatctccttaaattttcagtggagtcacaaatgaatatgtttccaataatgagaagaaacattttgttgtgaagttagatcaataaagtgtttaatagttaagggtatatggatcagttttctgattctttaaagttatgtggattctcaagaacaaagaatctcactgaccttttcttaaaagatatatccctagtacccactgtaagaaataattgatgctaaaatcataaacgcatggacaacaatgttaataagacaattcaccggggaaagaattgtcttttcaacacgtggtgctgggacaactagatatgaacaaacaaaagagtaatgctgaacccctacctcacattatatgcaaaaagttgactcagaatgaatcctagatctaaatgcaagagctaaaattatacaactagttgaaaaataatagaagtaaatttttatgacctcagattaggcaacggtttcttatacatgagactaaaagcacaagtgacaaaagaaaaaagttagagtagattcttcatcaaaattaaatctaagtttgtaggtagagcaccaaaggagaaacaggcaatatgataaggcaaagacttttgaccatttacagagaaaagctaaaatgtcaggttgattctaagttagaagagaagcaaattcacattttctagagaagaactacagtgtccataggtaactgagaatgaggggaagcaaatagtgaaaaaaatataaaaagataaaccattggaatatgagtcttgaaggaataaaaatatggtaacaaaagttttaacatagatgaaaatgaaagctgatgtttatcaaattattttgaaatcacattcctactcattcatttgcaaaaaaaaaaaaaaaaaaaaaaaaaaaaaaaaaaaaaaagatttgttcaaatccctccaagcagctcctgtgtcctggccactatgggggatgtaaacactggttttcatgcttagtgtctctttcttgcctgcacctggtcagtgtatcatttctggaggaagaaaaactgactgggtgactatatcattctaaccaatgatctcattcaaacaatttttttttcatcaaatagtaccttttcaatattttttaatttttaaaaaagtttttagacaagagcagtagtgagaagaggggaaagcgtagaacaaggagtttgatctgtaactgactgtgaacaatcaactgagataactcactacctttggatcagttcttttcaacatttttgaggcaatttttttgcattctaggaactgcaacattttttcagagaactttacaaactctcaaaacttttttttgtgaaaatgactgatttatgttttttttaaacctaataacttgttaacattgaatgttttaaatttatttgacataactctttgatttgtttttttaaaagtcgggggcagttagagccctaagcccaatctctgagattccacagatctggctgcacacctctatggtgctatttctgttcgtttcttttactttcaggatcacccacaaggtttgtgccactcttcatacctgtgaggcacttcaccctttagcacctttgattcaatccatcattggcctcattagatttctgcttaaaaaaactttttctccacctctttcattattttctgtttgcatgcccctctcatcctcactatctctttatcttgcagtatttttcttcaaagaacttacatttactgacatttctttgcacattgatttgcctactgtccaactctatcaccagactgaaagctgcatgtgggtaggaattttgctttattcaccacattcctgcacttagaacgcagacccttctatcttctattgtacaggagagcttttttttttttaattttttaacaaatagcccggtgtgatggctcactcctgtaatcccagcactttgggaggctgaggcaggcagatcacttgaggtcaggagatcgagactagccgggccaacatagtgaaaccccatctctacaaaatacaaaaattagccaggcatggtgacactcgcctgtagtcccagctactggggaggctgaggcaggagaatcacttcaacccgggaggcagaaattgcagtgagccaagaacgtgccactgcactgcagcctgggtgacagagtgagactctgtctcaaaaaaacaacaaacaaacaaacaaacaaatggagtggatttgggtaatcattctaaaccaaactgtttttggaattttggcatgtcagaaagcagatgaattacagctcacatgtacgactgcacccaacttcagtcctgagtctcttggctaagctgtagctctaccatcacatggatgatgagcaaacatcaagaacacagacgccatggccacggtgtggctggactgcttggattctgccacttactaactgtataacccagcaagttaattgaacctcactgtgccttggttttgtcacctgtaaaattaacaatagtatctacctcataggattaaatgagatcatatttgcaaagtactgcttaggatagtggctggcacagagtaaatgctatatgtttttgataaataaaacaattaataaatggaaatctaggaatgtggacaaaatttaaaagttggaaaagcaaactttggggcagcttggggaattctgtcacaacttatttttctgatcacaagtgcaatgagaataaatttcttcccaccctaccctaaactaatgcaatctcaattgagcggtggaacatgcttcattcactaattagaatttaaaaaggaagtgataacctcacggagcacagccccattgaccctgagggtgactatacaggaccttcaattgctgattctctcccatccttctctgggatctgtttctcccaccctccccattctgaggtagctggaagagagtaggctttgtgccctttggcgagtacagggagaaaatagtaggttcagcctctccaactgcccagggagaaagcaatacctttcaaggtccccaggctaaattttggagggatgcttttgtgtgtcactgtcaggctcacaccgacataaacccttgagaaatgcctggttggtgacgtcctagaggtaacaccaagcaagccccagattttctcttcttcgtcagcaattcccagatgaggtgctcttgtgtttaccctctctgattgtctggattccctgatagtaccctctatacaaggaactagaatgtttcttactggattcctctgttggtggtgatagagtttactttgggtatctagtcggtctggttgcccctggtatctctggttggtacaacagaatcctgactgagctccttagtgccttcttgaatactgtataattaactaggcctccaattgtgccccgccttgccccagcccatagatggacaatccctcctgccatgtcttaaagagaaattaccataataaatgactctccagacagcacatttcccagcaagagggggcatgtaaaccaagtctattagtattggcagcaaaatccaatgtgttattgttaccagtatgaacactctgggtatcctggcctcctatatagatatttgaaacaaaacagacaaacaatgtgaaggaaggaggaaaaacagccacacaaatgagttacagtgagtttaatgaaaactaattccattgctgggtccatgtgatataaccagccacttgtgctctgttctagtggtttataatgttacctcaccctctccaagaaattggtttcccgtaaatctctgtggccattcattcctgtctacacattatgttcctaaaatagacaccagctaaaaatctcttccaggagctttgtgaaggaaggcctaaattgcaaaactcctcctagaagagagatgtgattttgtaattgcttcattgcaattacaaaagcaacaatcataaaagagagttttaaaagagtttttcaccacagtcattctcctgaaatgcacagctgagggaaagaagaatgtcagatgccccgcgaacgtgcagaagctcccagttgcatcaccctggcgtgccaggtattgcagcaaataggaaaggtaagctacccacttctctgggcaggagaaactaaagcaggaatcaccaacctcagcatggaattttcctatttctgtctggcaacatcctcttgggatgatttaaagtgctttttggagaaatatgttctgttactatactagcgcatcagaaataccacgtgaacctgtaaatccatagaagaagaagacacattttataggtgtgatagcaacagcaattggcaatttgcaagtttgctactgcactcagaaatatttagtcacatgcacatattgacagtaatataccctgccttgacttaattgttgcattggacaggtgaaaagcacatacccaccactccagaccgatttgttaacaatcaccagtgagtaatcaaagagaacaaaaagaaatgagaagtaaatgcagcaagtgggtcgggtctttaaacacatacctcaaacaggtaggagtcaggaaatccatgatagcaaagacatttggacaagcctcacctccactcagaaataattcttatgctgttctgaaaagcaagacggttcacactaggaactgagcagtatctgcagtatcattgctggttgtgacctctgtctaagtaaaagtaagtcaatgtttcctatttggcattggatagaaaaggggactctttaccactctgctcaagctcttttttagtgtggctcaataggagttggcagaggtggggggcggaaatcattgccccttccttgttcaaggcatgaggcatttcttctcaaaagcccagcctcagcctcaggaagctgaatacccctgcaatgctaggctccagcagcagccccgctgccttctttcttcctgtggagttaaaactgagatctaatttttgctccgtccttaagaacaatatgacctctattcccagccagctagtccacttccaaagcaccagtgaaggagggggcttcaacaggatcaaaagggaccttgaataggatgaaggcaagcaaaggcaagaactggccagatgccaagctatttcaggccaaagaatcccatcttctatcaaaatgctgaactgcaaaacaaacctgatttcagttcatggaaggttgagagaggaggggggaggggaggggaggagaagaggaggagagggaggagggggacagttggtctgaatacacatacaaaaatggacttcctgctctgcccaaactgaatttccatggactctttttccaaaggaataactggaatgaataaacttaaaatcaagatgaaacaattagatggcttacctgattaaaaggaaaattatccatctgcagtgaggaacagcatcacccaaagacgagatgataacaatgtgccttcagttgcaattgttcagattccttcttgcaaaaggtgtcaaagtatttacaagggctgcagtctcactggggcagaacacacagacacacaaacacacacaaacgcacacatacacacatgcaccagagacctctgcagtatcctctcggcttcatcctcgcctcactctatggtacctaatacaaatcagcaaatagcttgtttcaaaaaaaaaaaaaaaaagtcaagacagcaccttacattacatcgccatctagtggctaaatattaaacactttctcacaatccagatttatgatttcttcctcaacctcttttctctcagccttttttcctttcttctctgtaatctcccagtattgcttctccttgcttctctttcattccctattgctatataatatcatgaacctaatgactcaaagaggaaaaggtttgaaagtaaatatagctattttcaagtagtacttgaaaaactttagcattattttagtttgaaactgttactttattcctaatatgaatcattgttatctataaaaatgatatatcttataaataaaactgtctttttattccaccaggaaacaatcaggtggccctttattacagatctatggcttcacatttttctgttttaatattgtgttttaggattaggtttcatattatagtgaacagctcagagtcacaaaatgtgagttttacttcaacactgatgaacacatgcctttaacaaagccactgaagtcttctatggacatttacattcttactatcttcatctgtaattacagattaaacaagactttcaacccactctcaatttctatggttttactatattttactccaatgttttcccatcttgtggacacagcctaaagcttaattataataacacattttaataagcaaatatatatagaaagagagtccaattgcctattacccaaagatagaattataaaaaccatgaatatcagttttttctaagacaataaaaatccatgccaaactaattataactcttggaactgagagtagagctttttatgttatatattgtattctaaaatggaatcagccttaaacattcagtcatacataaaatcacgattatgtgtagattagtcattggaagtaaatatttcatcctcattatttttcttttgccatctaacacacttattacaatcattgcatgtgttttatcatttatcaatataaccttcaatatttaatccttctcttccttattacaggatggtgagataaatactattaatgttattatattataattattcctatttatacttgagaacactgaagctttctgagccttactgaggtttattcaagaccacatagcttgcaaagcaataaaactaaggctgttggtcccaagagcccaaagaataatccactgttctttgcaacatacctaaaagttcaccattttttcctgttctagaatcacagaaaagtaattttgatttctatgtttacaaaacatttactagcccttaattatggaccaatgggtccatcttgtggatccatctttttatctataaaagaaagaaattaagtaagataatttcctgttccagctcaaaaactctatccagtgctttcccaaaagccagttggagtagcatgaacacattcatttgaagttactcaatgtctgggaaatgatgttgcccagtatctggtagagtcagggcaaagttgaaagaagatgaggagacaggtgatcaacaactggtaaacgattgccaagatgttagagatgaaaagagagtgggaactgcatgaactaacaggcaatttttttagaataatacattccatatgaatagtacttagagattagatatgtaaaaacacaaaataagaacatacctggccacatgttttaatgaattctaattgcatattataggtgccaatttttctgagtgtctgctcttaacaattcccccaatagttcttctcccctgatccttagtggtaaacctaccctcttgctacagaggactggagcaagagagggtatctacgcagctgacctggtcaaagagagccactacatgtgattctggcagctatggagtcagctttccctcaccatggggactcaggaccaggtggaccaggatactgaaatagcagccagccacacagatgtggaggaagaagtgacaaaagacagagacagactgtttccatctccagtctactcaagatccaaacactttcttgatgttgagtcccatgataaactcaaactccatgtttgcttaagtgaacttggtttctgttgaactatggagtcctaaccacttcattagcttcaagaaagttgccagtactgcatctatcaagtattattcatattctgggcatctgacacttcatttattcacttcttcatgcacctgatatatgccaggcacttttccagatacttaagtaacatcggcaaacaaaccagatcaaaaccctccctttgtggagtttacattgacatgtcagtcatatggaaaggcacaacgcattcagtgtgcacactacctttcttccgcctccatgtctttgttcacaaccttcacttctcttggcagacctttcatccatctacacatagcaaattcggcggatattttaaatgtctgggtcaaatattctctcttctccaacgtcttttctattttctcagcagatagaattcttttttcttttgttaattatagaacaattttatgttgtatcttatgaaacatggtcatttgacaagttgaaagcattgagcataaggagataaatgactattctcatacagactcctagaaaaggccaatatcccaagcatggcccaaagagtactattaactaacaactcatcattctgtacacagatacttcattcgtcagagctgaagcagttttacagtattagtaactttaaatcttccatgtttcagactgagcataaaggcaaaatatgagatttttattaaattagtgtaatatgcacttaaaatcacatatttattttttaaagttagcagaagatattaaaacaaaactctgtgctaccctatgtcactactacacttatcccatttgaccttgttctaagagttttatatatgtatcttatttggctcccagaatgtaaactccctgtggaaccagctttgcattttatttatttttttgtagattaatttattgagagataattttgtctctttctcactgttacgtttccaacttcaaaaaatgaaaaactaatcttcctctgcccccgttggtaaagttagccattccaggaacccctttgtaatcttgtttcagaagctggaaaaaattagctgcctacttcctaggtgacaatacttcaatctgtaatgcatgaacctgctaaacaggctgagggggcatggctgtggcttttttatgagagttcctaacaaggaaaagagaatgaaggcgtaagatgtcatttagtctttgtaagactccgtctctgtaagactccgtctctgtcctgtgaatgtggttgttactttgttatagctctgtcagttgcactgctcagtgccaaaacataaaagggaatattataatgggacataatctctgtcaatagattttgggtattaaagagagcgtgaggtcactcaggtggaaaaagctgggccaggtaattttgtctgttagttttacgacataaaggagagtctctcgatgccattagatcttgaaagagttcaaagagagaactatctcattatcagaaggctgaggaattagtgtaattagtatctgaatattctttaatattttcttgcatagaaaataaaggtaattggttatcaaaaatattctttcaaatgtgtatctcctggagttgtggagttctgaaactttaaccagctgccttatgaagagaatttattaattaactttatgcctgccaaggagaaggaaaccattcttaatttttagccaaaaatttcccaaagtgatgaccaaatcattatgttttgagttccagattcccttgtttagagttataaatgacatttgagttttaaggcagaaatgtttctaaattcccctgtcatttgtttgggaatctatagtcactgagcaacatgaagctgggtctcccctctcttcccaccgcaggaaaggaattggaggctggaggcgaacttgagtaccttgaggtggtatcccaaaggagatggtggtgacaacagacaagtctagatgttagcaggtcttctgatgaagtcggggagtgatcccaacacagatagcaaatgctagagtttggatttaaactcagaccttaagattttagatctacaggaccactgtatcactacaaatcctgactttgcccccttttgattggaataatcagataaagcacactactgatgtgatccttggtaaatgtaatttactacttaagtactttgcttttgtagatgtcaatttcctagtggtttttttttttcttttggtaaatgcagcattctgcaaaaatctactaccaattccttgctctcacaaagcattcaccaacactgtgccactattttagaaatagaaaccatatcctagccgaaaatgataaactcatatatttccttttgagattaacctgcccttttgaaagggagtcagaaatgaatgtgaaatttatttgctattagacaaataaatgcagaaactgcaattaagaactctcttttaggactagagccaactagtttttctgcaagtttaaagttacaattttttgatggcaagaattggccaactgatttcaaaatatcttataggtactaaagtggacttttgaaactctggtaaagtccatacattccataaattaaaaaaataataatcagccatttttttcaaatatgatataaaaatatctgagggctcctcccctccccgcaactggaattcactgaatcagagctgctataggcttgcattttttgatgcacagataaccagtttttaaatcacttgtaatataatgaacataaataattgaatttttttttcttacagatttgattctgaagtatttttgaagtatctttagaaccaatgtgcttgtgggcacacattacactatttaaaattttattaaaagtattttaaaaatccttagagagagaatgccagttatctctctctctttctggtagtggagaagaaaaaatagtataggcttttcttaactcaccacaatgcagtaattaaaagcaaaagagaaaggagggaagttgtgggattatgatggagataatcagattccccagttgccctctgccttccctgctatcgagacaacgcacagaagccagaattatgtctgcaggtgattatttcagggaagcagttactccttgttggaagattcactgcaatttcctttcaattacataggcagacattggtgttggagagggaaataacaatattcctaaaccaaataagtagcttttataaacaagacagaataatacatgaacctgatttctcaaagggaaattaagtatatgaatgtcaatcatctgatgagattagcattacaatataggttcagaatgagtattaaatcacaaaattactttttatcacttgatgtaatagcattattcctctgattatatcaccaactgaacagcacttcaaaaattactatagtgctctgtatatatctttaattttaaatcctttattatttgggggcctggtttatttttgatcttttcttctttagctaacgtgtaagaagacattattaatatttagtgaagatgacactaaatgtcgtttttcaaaacaacaaactctgccttttcctaaacaagcagggagccattatgccttcactgttccgcttcctttgtttcctctgttttcaggaccttctcttctttgaccgcatcttcctccaccctctatcggtgcacctctccacggtctgaccccactcaataatctctttgaaagtaagaactatgacttattttttttgtcattgttccccaaacatatcccaagtctgtggtagaattaaggtagtttctggagagaacctgataacatctgctgagtattgatgaataaaaattccgtaatagacttccaacaaaaccctggagtagaataaaataactttgtaaacctcataaaaaagaatgtcaatttacataaatcattaccattgctttatcgatagggttttgctaatcattgagaaattgtggagctggaaaagtctcagagataaaccaggcaagtgttcttattttggatatgaggaaactgatgccaagagaggtgcagtgacttgtccaaggtcacatagatagttttataccacaaaggtccattcaagttttcccacagtttaactctaaaggaaattaatattgagtaaggtacatcagcacataagaagcaaaatggaagtgagtgaagtatttctagatatgccacaattgattttcactcatgttttgacagagagatggatgtgatgaagggtatgaatgcagttactgtttaagaaggtgatggactaaccaacattggttttagcaaagaataaagaaagtgactgtccttcaatctagctccacatgcggttcttaaatattaaccacaaagtactcaagcccaagggcacgagctctgggtatgcagagtgtagcattgacagctttcaggaatgcaggcccaaagacagctccagaaaatatccaggaagcaaactatcttgaagttctatactttctttgaaatgccaagatgtaatctaaaaatatgtgttctacttttttagtctaataaaccacatttatatgatggttatctgtcatatggggagacaaaattcaacatttcacatgcctgagctttatacccctcctttaaatgtatcaagatttcataaagctttggttcttcagaaaagatcaaggtacatcacaatatttaaagcattatctccatatctattgccacaggaggataaagagaaaataaacataaatgcaaataatgaaaatgcctgagcaatcataaagaatgaagttactgtgtggattctattctgtgtttatgtgttctttcctttgctcttaagtcagttaaacataatgcttgggttctttcctgatttatttcattcagcaatcccccctaccccccgacatcccttgcaaagatgaatcaacaaaagctattaccaagaacaatatgattgattacttattggaactcgaataccaattttccacttaagtatatctttatatcaatcacctcacttgcctacctattgaagagtttcaattagatttttttaataaagaggactttctttactctaaaggatatagctgatatttatgaagacaacgctttatttacagaataaaactgaactttgccataacttagcataagcaaatatgtagtttctgtttccctaaagaattcctgtcaacatctttttcctttcatgttcaaaggcagaaagtcattgactttaccaggagcacagcaaagccatctgtaaagtatacaagtgtcgctagaattaggtgctaccatatttcttggggaaattaacatttttgacacatctgtatgcagttccaatcttcggatatcaatttacaaactcacataaattacatttggttacatcttttctttttgtttctttccttgagaaaagcaagaattctactctaggccaaataatggacagaaatcattagggtccactccagggactgaggccctttagaagagattggcaagtgactagggaaaaggtacatcgaaggtcagaaaataatgacatttagcctagttctcctcgtgattccttggaaattttggggcccatgagctcagttgctgcttctgggattgcccctattcatatcaaatagcagagaactgagatgtcttacccacacctgagaagattcggatgtgagcatgggatagaggtgctaggcagcggcactttcatgcctaagtgcagtctctcatacctgttcatctgcagtggcatgaaaggcaaacagattcttctgctcattatgggttgttgaaatgacagaaccactttgtctcaacattttctatgacacttgatacataaggaagctcagagactaaagtccttgtttccatgttgcactaggtctttttgaaagtctcttttacattctgattgctatcatgacatcaaagtcacctgtattcctcatctttgtggggaagagcaggctaaataaagtaggtaaggacaccttctgagtctgcacccctttaattgacacataggggatgtgacccctgacgtttctgcttcccttattctttctgcaactaagcaaacatagaatgtggattttcccatgctcttagcaaggatgaaactcagcgatcatttgctctacttcacatggtagttgtttctaagattacatatcatatatatgcatatatatatatgttatgttatgctacacacacacaactgctaatgagtgttctctctccccttttcttgtccctctgctctctaggacagcagtagctttatatgtatctctatctgccctaagtctcctctcttgggcatcacaaacagagttacccttccatgaaccatttgttgctttaaaattatacctcagatgcagtcatggtcctagcagaaagtagatggtacattcaaaatggttaaaataaaaataattatggagaaactattgaccaagtgggttaagatggttgatgagtgcccaggaactagcaatagagagagccaatgccattccaggcaagagtgaaagtggcaccagattccggtgagagctagagctttagaagacccaactgagaggtttaactaaagaggaatgcagctgcttttttaagctaggaagtgaggtgtggtcggggagactctccaattttctgctaatgcctgtcttgggctgcattcaaagccaacggatgaaggaccccaagtttctcaatccctggaaagtggacttgaaagtctttccctctacttgtccattattccacttctaacctacattttaatactcccaacactctcttccctggtctgcattccttggagtccagtgctcctgctagtagcccttcttccagggctccagcatttgttgggctctgggaatgttttttccaggttggcagttgtgaagggctggtgggaactggggaaaataacaatgtgtctcatcttatctctaaaaacatctctttttctttgtttaaaaagcaaaacacatgtgtctaaaatattttacagagatgaacaaaaatctttatgataaaagattctatttaataccctaacccttaatacagtgcctagtatatggtagtgtatgatatggtttggctgtgtccccactcaaatctcatcttgaattgtaactcccacaattcccatatgtagtaggaggaacctggtgggaggtaattgaatcatggtggcgagtctttcctgtgttgttctcatgatagtgcataagtctcatcagatatgatggctttaaaaatgggattttgctgacacagctctctttttgcctgctgccatccatgtgagatgtgacttgctcctcgttgccttctgccatgattgtgaagcctccccagccatttggaactgtaagttcaataaacctctttcttttgtaaattgtcatgtctcaggtatgtcattatcagcagcttgaaaatggactactcagtaaattggtactgggagtggggcactgctaaaaagattcccaaaaatgtggaagccactttggaactgggtaacaggcagaggttggaacaatttggagggctcagaagaagaaaggaaaatgtgggaaagtttggaactccctagagacttgttgaatggctttgaccaaaatgctgataatgatatgaacaacgaaatccaggctgaggtgatctcagatggagatgaataacttgttgggaactggagcaaaggtgactcttgttatattttagcaaagagactggtggcattttgtccctgccctagacatttgtggaactttgaacttgggagagatgatttagggtatgtggtggaagaaatttctaagtggcaaagcattcaaggggtgacttgggtgctattaaaggcattcaattttaaaagggaaacagagcataaaagtttggaaaatttgcagcctgacaatgcaatagaaaagaaaatcccattttctgaggagaaagtcaagctagctgcagaaatttgcataagcaatgaggatctgaatgttaatccccaagacaatgaagaaaatgtctccagggcattcagaggccttcatagcagctcctcccatcacaagcctggaggcctaggatgaaaatgtggtttcatgggccaggcccagagttcccatgctgtatgcagcctagggactttgtgccctttgcctcagccattccagctatggctgaaaggggccaacatagtgcatgggtcatagcttcagagggtgcaagcctcaagccttggcagctcccacgtggtgttgagccggcaagtgcacagaagtcaaaaactggggtttgagaacctctgcctagatttcagaagatgtatggaaacgcctggatgcccagcaaaagtttgctgcaggggtggggccctcatggagaacctctgttaaggcagtatggaagggaaatgtggggtcagagcccccacacagattccctactagtgtaccacttggtggagctatgagaagagggtcaccatcctccagaccccagaatggtagatccactgacagcttgcactgtgttcctggaaaagccacacttaatgccagcctgtgaaagcaactaggagggagtctgtaccctgcaaagcaacaggtgtggagcttcccaagaccatgggaacccacctcttgcatcaacgtgacttggatgtgagacatggaatcaaagatcattttggagcttaaagatttgactgccctgctggatttcagacttgcacagggtctgtagttcctctgttttggccaatttctcccattttgaatggctgtatttgcccaatgcctgtactcccattgtatctaggaggtaactaacttgctattgattttatagcctcataggcagaagggacttgccttgagactttggattgtggacttttcagttaatgctgaaatgagttaagactttggaggactgttgggaaggcaagattggttttgaaatgtgaggacatgagatttgggaggggccaggagtggaatgatatggtttggctgtgtccccactgaaatctcatcttgaattgtaactcccaccattcccatgtgtcatgggaggaacccagtgggaggtaattgaatcatgtgggtgggtttttcctgtgctgttctcatgatagtgaataagtctcacaagatctgatggctttaaaaatgggagtttgcctgcaaaaactctctttttgcctgctgccatccatgtgagatgtgacttgctactccttgcctccagcatgattgtgaggcctccccagccacgtggaactatgagttcaagaaacttgtttttcttttgtaaattgcccagtgtattagttcattttcatgctgctgataaagacatacctgagactgggtaatcatggcagaagatgaaaggcacatcttacatggcagcaggcaagagagaatgagagccaagtgaaaggggaaaccccttataaaaccatctcgtgagacttatacaccaccacaagaacagtatggggaaaactgctcccacgattcagttatctctcaccaggtccctcccacaacacatgggaattatgggagctacaattcaagatgagatttgagtggggcacagccaaatcatagcaggtagagactcaggaataaacatatggatattcaagcagtactatttttagataaattctaagaataattttagaataataataattgttgttaattttattgaggacttaatatattttgggaccttcaaacctcacaacagtctcataaaatagttgctattaccatgttatcttcatgaatttataaatgaggcaactgaggctcagagtagttgagcatcttggccaagatcacacagtaacgaggtgactaagtgtgattctgaaaccagcagtgtatctccaaagtacctaatcttaccataaggccatactaaaactctccacaatatcacattattaaaattatggtggaaagtctctgcaattcgagttcacaggcaaacaaacagaagacaatagtctttctttactgctaaggattacatcacattaagctcatataaggacataatgggggagagacatttctacaagtagctgaccgaagatagtttttaggtgtatgatcagtctgtagcctggattcttgtcaaacatgttagggggcagcatgtggcagggtgggagggaggcaaatggagatcttccttcttacttgtctcagattcttcaatcttccatagcaagtgaaagaatataactatgtttggacgtactctcaccaagttaacaaatacactaaacacatgagtagtgaggggagaagcatgcctcaatctggcaaagcttcaatctccagaagtctaaatttgttagaaatgaaaaagctagcaaagcagaactgctgatcgtgaacacttaacagtaagcttcctttggtggaagcttcatgttgcaaacatcgtatttaattaggtgtttttttctcagctcattttctaaaaacaagtgcttttcggctctgcttgatgtttgtgaagacacggaccgcgcaaaaccaggatactttcagaattttaaaaccttgcttctgaaagtgtggccacatactggcagcatccccacttcttgggagcttgttgaaaatgtggactctttggctccacccagaccttctaaataagaaagtgcattttaacaagatttccccaggtgattctgtgcacattggtgtttgagaagccctggctgtcacatctggcctcagctcttaaagcctactcacttccttctgcaccttgaacatgtaaatcagccattctgccctgctcaccactccccgggtgttcccattcccctttgcagccctgcttgtacatactatttagatacaccaagcaaacccaatctactcttctaagtcacatttctaatgtcaattgacttgagtggctcttgaagtaaaaattaactttccagtttctcttccctcaggcccagtctgcagtggcaatcgctgttaatttttttttttttatcttctttagaattcttgtgtatatccaagcatctgaaatatacgtgttttatatttttcttttttttataaataacattgtaccagacaccaggcatggtgtttcacacttgtaatcccaacaatttgggaggctgaggtgggaggattgcttggggccaggagttcaagaccagcctgggcaacatactgagaacccatctccacaaatatttttttaaaaagaaagaaaaacatcacacaatatatatggctgtaaacctagtttaagttacataatttatctctaattagttcacttattattgcttaaaatattttgttctgtatatagatggatataccaaagtttatttaatcagttctcagatgataaacacttatgttattttctttctttcttccttttcttttttttttttctatttcaaacaatgcggatgtatacatttctttacaattgcatttcccacttgtgcaaattttcctttaagatctagtctcaggaaatggatctgtcaggtggaagggtatgtgccttttaacccagtaggtatcaatagatttccctccaaaggtgtggcaccattttatattccagaacagcataagaaactgtttccatcaccagaaattatcaaacttttttctttgttgactgggaagtagaatctagactgtcttaaacttatctaggaatttctctgaggcatttatgagtagacacaaagagggtggaggagaaagaggaggtgcattctaagaagaggagatacatgtaggatatatgtaaagttgggtctgtggaagtggctagagtctggagaggtaggcagacagccagatcagaagggcctggcacacctgctaaagagggaaaactggaaccgcattcccaaggaatccatgaaaatatcgtgttgagaagataaaaccaaatagtttgctttttatttccacaagtttggaggagccatctgtttcttgtcagggcattgactgataatagttgtgtctttataattgggttgttttctcctaaaactcaatttagacaaagtaagtgtcagtgtgggagggttggctaattgttaggaagcaacatttggtaaatctggaggccaaacccaaaacttttatatttttatattcctggttgtgcttactactataaagttaattataatgcttttactagaagctgtacatttgaaatcaaaacactctatcactgctactttcccttctcccagcatgaggtaacaataatattctttaggaaatttcatatggaaggttgacacctgttgtactttccttacctctctgaataaaataattccaacagaacactgacaacttttagaaatccaatttcactgtttcacttgctgatatggtttggccgtgtccccacccaaatctcaccttgaattataataatccccatgtgtcaagggtgaggccaggtggagatacttgaatcacgggggcagtttcccccatactgttctagtaagtgaataagcctcatgagatctgttggttttataaatgggagttctcctgcacaagctctcttgcctgcagccatgtaaggcgtgtcttttcttttcctttgtcttctgccatgattatgaggccttcccagtcatgtggaactgtgagtccattaaacctctttcctttataaattacccaatcttgggtatgtctttattaccagcacaaaaacggactaatacactcgttgaatataaaacagaaaaaggaatgccactttatcagagagctataatttcatttgaaacaaaacaagaaagatttattttttcagaactcagcatttttttttttttttttgagatggagtttcgctctgtcgcccaggctggagtgcggtggcaggatctcggctcactgcaagctccgcctcccgggttcaagccattctcctgcctcagcctcccgagtagctgggactacaggcgcctgccaccacgcccggctaattttttgtatttttaatagagacggggtttcactgtgttagccaggatggtctcgatctcctgacctcatgatctgcccacctcagcctcccaaagtgctgggattacaggcatgagccactgcgcctggccagaactcagcatttttatcaaacaaattccagatcctaagacatgtgtgactaaggatgtattttggggtaaatgaggaaaacaaaaatgttgagacctttacttatcttcaataatcaatgcatctccaaaatggcgctattaaatctaatcatcttggatttggttgatatttggatggtcatattgccgagctaaactcctttacctagaatattataattagaaaaaagtctgaggaatcatctaattcaggctctcagttgacaaagaatttaccttactttggtaaaaatttgtttggctttatgtggaggtttctcaaaaaactttgaataattattttctgaaataatattctaaattggaaattggaataaaagatcattcacgttcatcttgagtattcactttaagactaaagagggaagtgactttgtgatccaggtttgtgacattgtattttaaaggaggaatttatatttgatcttgggaacaatttttcacattcaaagtctgagaacatctccgtatcaaacccaaagagattttctcaagtgaaataaagtgaaacaaagaaagtagcattagcagttccgagttgcagacagttctttttaaaatttgttttttggttcttccaggcctcatttgcaagttgctacttaattaactagggtggttaatgttaggtaaagtccaaaatgtaaaggaactacatagcaataacaatatttcagtatttcttcaataaaagttactgacactctctatatgtcaagcactggagggtgccagtgaaaagagatggtctgttgctatgttctgcattttcgttggtgaaaacagagaagttggctgggtcatcagtgtggtacctctggtaaagctcaagtatagggaaatttaattcaatctcatgtttgaattattccctcttaagggggtaataatcctattcccatggagttttttgagggcactaagtgatagaacacatgtgactatgactagtataataaatgatgtattaaaatcattctataatacatataccggaaaattaattaagcatatgatacgaataaatgtatgataagtcaggtaaaatgcattaatcctaggaataaaacaaagcactggtaatctctctgaaggtcttagagcaggaagactcttgagacaggtctttataaaaaatcacttagaaattatacttaccaatgtgttcaaactacatgaactattgagttttgctttgtaggatagtggaacgagaagtgaatttggcatttggagaccttgagcctttattttctcactgcaaaatgacagagataatggggcctatcttttagagttgctatgggtctcagaaaggatcatggttttttttttttttttgagacagagtctcactctgtcgcccaggctagagtgcagtggcgtgatctcggctcgctgcaacctccgcctcccgggttcaagcgattctcctgcctctgccttctgagtagcgcaccaccatgcctagctaatttttgtattttttagtagagatggggtttcaccatgttggtcaggctggtctcaaactcctgacctcatgatctgccagccttggtctcccaaagtgttgggattacaggcgtgagccactgcacctggcctaagtaatttttttttttttttttttttttttttttttgtgggggacagagtctcgctctgtcgtccaggctggagtgcagtggtgcgatctcaggatttcactgtgttagccacctggtctcgatctcctgacctcgtgatctgcccgcttcggcctccccaagtgctgggattacaggcatgagccaccactcccggcagggatcatgtttttaaaattacttgaaaatacatatatagtcattcaagtatgaggtattattattttaacagaaatatagctacctatatcttatattaggttccttaatccacatatatctcagaatagcacctaatttgaattgtagaatagtatattgaaaagaatctttaactgttggagaaaaatttgtgtgtgtgtgtgtgtgtaggcgcacatgcatgtgtgtgaggcttgtctacttctatcgcacatatcaggtcgagaaaatgtctgtactaaattgccaagtggtttaggtaaaaattcatgggaaggtataatttaaaattctgagactctagcttgtaacatttgtaattttaaggctaaagacatgaaaatgaacttaaattcaatattccttccaacagcctatgattttataactttatgattataccatatgaccccaactgccttctatgtatggtgaatggttctaaattgaaggccctttatcttctaaactctttgatgagtttgggcatctacgtctggatataagagctgtggagagatggactactttccatactaagaagagaaaaatttggagtgttcagatctctcagggaggggatgaggagcagagatgggatggggaagggagaaaatgcgggtagaagcccacatctttaataaaatttattaaattgaaaaggtgattggtgtaggtaagtctctgttaaaaactagggacagacagacactgggtcacttgacagagtggttaggtgtagtatacatgaaaccacgatgccaggacacagaggatgatgtaagactaagtccctgataagttgcagaaggttttggacttccactgactgtggtattggtagatacctgagcaagatatctgccaacagatatctaccaatagatcgtcacctagatcttcaagggtgcaaacaggtcccaccttatacctgagttatacaagtaaaacatgtcttcatttatttataagttttaacctacctacttccaaaaggataaatgatatatttgttgtattatttattatgatggaacttttcatagcggagctaatctaggtcagtggttctcaaatgaggaggaggtcagttttgcctttggtagacaggtatcaatgtctggaaatatctttggtcatcacaactgagggtttctatggacactttgtgggtagaggcaaggaccctgctcaaaattccacaatgtctgggacagaccccacagcgaagaatatctgacccaaatgtcaatagtactgagttgagaaaccctgatgtaagccaacctctcatcttaataaatgagaagctgaacatcaaagagggtcagtgatatgtgccaaatcacacagtgaacaaacagataagtcctctagtatttttcccattacagtatttaacttctaagagctaaagttctaaaatggaactgttggaaaatagaccttcttatggacatatttagacttaaggtatactcaataattgcataaatctttaaaacatagtactgcttacagtaggatatctaggcaaagatgaacatagaaaatttaatgacaatatgtatttaactatatacagtaaaaaccatttttataatatttaaccaaattacttcccagcacagtggttctcagacttcagcatgcctcacagtcacctggaggaaaggcttacacaaacacagattgccaggacccatccctagagcttctgactcagtaagtctgtcatgaggcccgaaaacatgcattcctagcaagttcccaggtagtactgatgttgctggttaggagaccccactttgaaaaccactgtcctagaatttagtaggtacttagtaaattttggcttaatattgtaaatattcaaacaatataatctcaccaaaaaatgtaatctcactttaacatagattagttaataatgttaattcccatttagaggaatacaaagatatatatggtagaatcaaaactaatttaaacctcatttaattcaaattccccattttaaaatgaaaaaattaatatattttaagcttattacaacaaagaagaatcccttttagcaatagccaaaagaaacaatattaaatgcaaatcaattatagacaatttgaacactgacattgttatctgaaagatatataaactcaaagattataagtacaattaagtatgtatccatcattttttaacttatgaggaatagtctgaatgccaaactgagtaaaacctggtctgatggggctcttatctcaagctatgtctagggaaaatgcctattgacttcagtaatataaaatcaggccccgagggaccataattgtctctttaaattatttgggaaatcatgtacatgtttaatcaactaaatacagcatacaattgtaagtggtatattttcatcataaataatcaatgtgctgctgttaatatggttaatagaatgaaaagtaccttcaggggaatttattttacgatcactcattttcattcctttaatttaatttttaaaatgcaagaaattttagatactttaaaactacctgtttacctagaaagtatgtgctaagtaacctgcctaatgccagtcatcactgagagacaccaaaacaaatgattgatagttaactttccattttgctctttgagatcacgtagacagtttatgcagactttactttcctaactcatgtcatcctgtccaaggtactgaacttcacttgccaaggacacacaggaagataaaccctctcaaatgtgctacatttgtcttcaactttttaaatatccatctattttttagattagatgccatctgttgtattatcatatctggttaaatcttattaaaattcctggccaatatatcactctgctgcggcaatcttaccctgctacctctctaggcttttctgcagcattcaataaagagcctgctattttaactaattgctgaggcaggacacagtgtgagagtctaaaacagaatcagcgctatattgtttctacttttacccatagagtgaacaactgttcatatcaaacctggaatcatcccttcaagtctcctaaacacagcacagtttgagccaatgcagttaatccaccctccttcagtgctagtgtcgaatggcgcttttgctgcagtattcaccttgaaactaagtaggcaggattcattatttgttgaagtcacctaactgccagtttattcttatacgatcacaaacaatcacaacagaagacaaatacaggcatatatataactcacttacaagggaagcaaatttgcagccagagacaagggcaacgtaacagccaagaactgcagtaaatctctttgagctaatagccacctctaataatgctctcctacaacacctccaatcaaataaattgtattcagagtttaaatatcaaatcaacattcattccttgatggttacagatgatgtccgataagcaaatttgaatttatgatttatttactccttaagtgtctcaaagccaggattactggaagacttactatgcttattcaagcatgctgacagaactgtaatctcagtaatttctccctgcacctctcagcatgactgacaggcatctgccaagactgtagtacataaactgctgaaacatgcaaaaatatttacccccaaaagatgtagtaaaagctcagcttcctccagcttccataacccctgaagtgttaatctggaggaacagttccatgagtttccacaggccagcagtgtgtctcctacactt

SEQ ID NO: 2 - RNA, 164521 nt, Homo sapiens
auaaauaaaaguugcauuccaugaggagaaaacaaaaaaacccaucacagugaacaauugaauugcuccguggacaucaugccuuucuaagcaagcauugaauauaggagauguauuuaugauaaccagagacagaguauguauagcuuggcuccauaggggugguguucucgguuccuaugucuaccuuuuguauuuuccagcccuucccucauaauguuacugggaaaguuaacagcuagcauaacauuuugaaaacccaaaguguuuauaucaacaagauuauucacagucaaauuuucccauaaauaucacugggaccuauauuucuuuuaauuuuaaccaagagugaagguagugaguauagagcccuggcuuuagaaacuaaccuuuaaaaauaaugagauaaugacacagugaauaaagaugcaucaggguugagcaaaguuauuuuuuaagauuagaaaaacugauuuugaaaaugcaaaggcagacaaaaaggaucagucaagagggaaagaauaaagauagaagagaaguagaacaagucauggagcaagguaucugagaauguagaaaugaaugggaaaaauugaucucugaaaagauauaaaaguauggauugaaggaaggaaggaaggagagggagagaggaaggaagggagagagggaggaagggagaaagggaaagguaggagggggagguaaaguaagaaaaaggaaggaaaaaggaagagaauggaaggaaagaaaaaggaaggaaaaaggaagagaauggaaggaaagaaaaaggaagggaagggaaggaaaagggaagggaaaagggacuuagauauuuuucacuggauaggaaagaaauugaggaaguuuauaaugauguccucuugcuuguugcugaggugaggggcugaguuaucugcaaauaugaggaguguucuaacggaaugauaaaggacucaagcaguugaguaaaaucaauugauauugcaaauuauccacuugugauuuuaagaauuucuuggugaugcaauuuucccaucuauacuugauugucuagaguauuuuccuccucuagugccuuugcugccacacugauuaaaucaauauugauugacaaccucagugggauauuuccaugugccaggaagaauaguacuaucagcaguacccaauucauggugguuuagaaacacauuuauuuucuuauauaauaagaaauuccagugcacacaugaagaauaugcaauuaccagacauauuugcugucuuuagugcgacaaguuuauauaguucgagugucugggcuuugugauacagauauacaaacauacaaacuuaugcaguagaguugucugucccaaugguuacuagacuuuuggauuucaugcaccaguaaaauacaaaugggaggaccgacaccagguugccaauuuuccacuuggcuaaauaaaauauuaaaaccaaugacccauuaucacguauucucaccaucauuuccaaagaacauuuaaacauuaaaugguauuagucuuuagaaaauaaucuaaaagauacaauuucaggauaaaggucuuuaacuuggauauguucagcuuuauaaauauuuauggcauuauucuuaauuuucuggcuuaacuauagacauaugaaaaccuugucauaagggugcugcucuguggagcuguguuuggaauuacuauuuauacccacagugucugguccccagcuuaaacagcaaagugccaccuucuguuauccaaaucagaucuguuuagcaucaaauacuggggucuuaaccacuaugccgcagaucuuuucuaaaauauucuuauuuuaauuaaacagugauuauuaugaagaacaaggaauguaaucauuucugugacuuuucaggaagauuacugcuaggaaaugagaauaguaguuaaaaaaccaguauauauugaauuaauuaccaacaguagaucuaauuuugaagguagaaauuauaaaguccagggcauacaaaauaugauagugugaacacgcagacauaggcacuucaguaacacacagcaaaaaaaaaaaaaaaauccuccccuuucuaaagacacacacacaucuauacuuuuaucuaugucuguuuacauacauacauauauauauaaauguaacucauuuuucuuugaacugauucaagaaugagcugcagacauuguugcauucaccccuaaauacuuuagcaugcauuuucagagaauaagaacauuuucuauuuucauggaacaggcacacuagucuuaacaaaauuaggaaaauuaacacuauuauaauacuaauaacuaauaaacaguccauauucaaauuuauucaacuuucccaauaauauuauuuaucuguuauuuuuuaauuugauauuccauccagaauuguguuuaguugucauaguucuuugaccucauggaauucuuuagccuuucuuugucuuucaugacauugacauuuuuaaggaguucaguccacuuauuuuauagaguguccucaauuugauuuuccuuguaguuagauucugguuuuaaaauuuugacuguguaccaagaaguaauguggcccuuucaguauaucuuaucaggaggcacauaguaucaguuggucucauaauugaugauaucuuugaagguauugucugcuguauuucuccaaaguauacuuucuucuguuuaaauuuucuacuuaauagagaagagauacuuuaagaugcuauaaauacccuauuccucaucaaacuuucacccaugaguuuuaauacucauugaugauucuuguaugaaucaauugucauuagggugauugccaaauagugauuuuucuaacuccguuauuucuucuacaauuguuaauuaacauucaacugcaagaaacagauuuguacuuuuccuuauuuacuuacaucaguauguauuugcugauucuuauucaaugaauuauaaucuuuuacuaucauuuauuuugaugcucaacuugccccagauuuggccagugggaagccccuucuaguugguuccugugucuuacugacaugaccucaucauucuuugaagaauaauuacuuuuuagcacagaaaauaucaugccaaauauuucaaaaugaauauggagauuuauaugauuauguuuuaccaguucuucucuuuguauuuggaaagguaacagugaguaauggcguggauggguaguauaaaaagucugcaggguuuauccuauaauucugaccuaccuuaguuggaaaugggaauuuuuuucagcuacuaauauaucagaauuaauuguuguguugcuuuaggauugugauguuaugaagaggcaaagucaguccauuguacaaggaugggaaaagccuuuuaauuacugucccuuuucugguugaggcuauauucccucuucuggcuucaccugaugacaagggaaggcuucucguuccucagaaauuuagauagauuaauuuagacuguuaauuuuacuaucuggaccacccgaguaaccuuuccaugauaucugugaauucugcacuggacuucacugugguucccccaguuacuguuuuucuuuaucugcaaaaguuagcaagauuaagaccccaagcugaagcaaggcacaucuuugcuuccugcugacuuucaugagcuguugaaucaccuugugucagccaggcaggagacagauggcaugcugaaaugaggcauauagaagaauuucaugaaggggacauuuacaaaagugucagcaauguuaggagaaagcuacaaggaauacaaaagcacucucaaugcagcagcagaccugaaggagcaaggggaggagugauuaccugaccccagagaaaguagcuucaguuguaugaggggcagucugauuggaguaugacuuuucggggaggaaugaguccagugccaacccagcaaagaaggaauuggagaagaaauauuccuaugucaaucuucucucucuggugcuuucccacuggugcuucucauuggccaaaccaauugggagcucaaagguaggagagcccauuuuugcaauguguagaagucacccuucugggacacacagaaugaugcagaagcagagagaguggcucuggaggagcaaacacaguauccuacacacauggcaauucuaaauuuuuaaaugaugauuuaaggguuucuuuucauagcucaaggggucauccaccaucacucuggcuuccauacuucucuuccuccuagaaucacuagcuauccucugacaccaguucuuccuccuaacagagaacacaccugcugcuuguaauucugggaggucauuacccccuaccuccagugacauaucuacccuagguuuuguugucaacguggguaugccucugugugugugugugugugugugugugugugugugugugugcgcgcgcgcuccccuucucccccaauuuguaauguaaaaaaucuccauaucauuagaauauucuguuaacaaaaagugacugggcaaacaauaaaauaaaaaauguaaucuuuauuaguuuugcacauuuuaaauguugguuagcauuauuuagcauaauaguagcauuuuccagcaugcaguucacgaauacaguuuaucuaaguaguuuuaaggaaaagaggagccuaugguuugcuucuguaagaaacacaaaauguccugauguaauugacuauauaaguugacuacucuguuuuuguggaaaaaaaaauuaugaagcccacauucuauuuagaacaaucuagagcagcauuacuccaaagaaaugaaaacauaaaccgaagucagaaaaaaagaacaaaaauaacauaagcacuaccuucaauucaguuagugcagguacuaccagaaauauaaauaaaauuuuaaacccuuuuccaauugcaaagcauaauuuggauaugaaucgugaaccuauuuugcuccuuaaaauugugaaauaaucuaaaauuagcaaauguaauuuaaaaagcagaaaucuacaacuacccagucuuguuuucaugucuuauuuagcaaauuucuuucaugaaaaaguacuauggacagaaaguaagaaaagugauugugauaucaaccugaagauaauuuccucuucauauuuauguacauaaugcugaaaaauaaaauaaagugacuuuuuacaguauuuauauuugcuuauaaaauucuaaacacauauuuaauagguuaagcaguguguuuuuuuaaacaugucuguacagucuggcuauauaccauauguuauccacuuaaaauguaaaaauaaccaaaaagcuguuaaagugcugcaaacuauugcuuaaugacuuaaauaaaugagaucuguugaacaauuuccuugacuuuaccacugacauaugguuucucauaaaugagauucugagcagugagagaaaccagauacagcagcaugguaauauaaacaugcauugauagcauccaaacuaucuauaaaugguacagaauacauuuuauuaccuguguaaagcuugcacucuacauuucuugugguacauauuugaugcaauaaauacugugcuuaggucauuauuuguuugcucaaacgugcaccacaggguaaaaugacuauuuacauaauaaauagcauuucauuaacauauacagugucaaccuugcugagagccgaagauggcuaaacaaagugcaggaaaaagcagaaauuuauaaagaguaauuuuggucaauucagucuucuggcgguggagggugaggggcaauauucacuauucagguuuuuuuuuuaauacaacaaaaagaaacauaacauuuaugacuccaaacauuugaaugaaguuugcaccugcuaagauuuacuggccuacccacaaauaaucuacuuggucuaggggcuggauuucgcaaaacaagaucaacaaagcaccuccacuuaucacccaauuaccccucccagaaauauggugaaauuuaagaauuuguuuuucuugugacuuuuucucaugcaugaucucuaagugcagcaugcccucaugcaaaccacgacuuuguguagcugggagggccaugugguugccauaccccccagguggcauaccuguuauagagguccuuagccuauuucucaacagaaacuucguuuacaaaaauagucacauauaauaaacacauggauuaacaaaaagaugaauccacuaacagauuccauaaaaaugugacaaauguggcaguugaaaugcaaacaguggauacaauuacuacacuaaaguguuucauguuaaacaaccccaaaaucacagguuugcaccccuugaaacuggucccuacagucugacuagccauugugcaucuuaucuucagcagugucagcugguagugagaacaguaaccuccugucaaggucaucuccccuuuacacagagucacaguuugcugacaaggggucacugucuuauuguaggcacugaccuuaaggagauuuguguaaaaacagucaguuuggcauugaccuccuaaaggaguccuguugauaaaaauacaucaccuucacaggcuguaaacaauuugucacccaauuauuuuuauuuauuuucauuuauuucccuuuggcuuuuucaucuuugccuucuugcucauguuuuuccacaauuggcuuugucacccggucauaggaagguggacaagcugcaguggacauggucagaucaguuuuuucuguaauagaguuuucauuuauucugucaauuaucaugucuucuuuuauaagaagauuagccccaccuuugauuuuguuuuuauuguacguaaaggaagcuuguuuuacaguucgcuuuaaaagguggcgucuguaagcacgcugaauaaugacagcagauacuuccucuuguuuucguuuuaaaguaguagugauuggcugauaggagaccuuggaaggauuggaagccaugaaucgcucuuccaucuguauucguagagcauccaucucuccacucucuccuagaacccgcuuuguaaaagcaaauaagauaucaagacaguggauccggucaccacucaccaugggcaaauccauggcaaugagcuggaguuuguuugguuguggcagauugagaggcgguucaagcgcagcugcaaacugagauaauuuuucaaauuccaugaacugaguugcaucgggaucaaacuucucccaaaccucauagaacaucucaaagucauccucacucagaggcucugcacuuucuucaguagcaacacugaaguucuccaggaugaccgcgauguacauguucaccacaaccaggaaggauaugaugauguaacugacaaaaaagaaaauuccaacagauggguucccacagucucccuuaacugagcuuccaggguuaacuuuauuagggucacagucggguggcuuacuguugagaaugggugcuagcaauccaucccagccagcagagguuguaauuuggaauaggcagaucaugcuguugccaaaggucucaaaguugaacaugucaucgaucccaacuucccucuuaacauaggcaaaguuggacaucccaaagauggcguagaugaacaugacuaggaagaguaggaggccgauguuaaacaacgcaggaagggacaucaucaaagcaaagagcagcgugcggauccccuuugcuccuuugaucagacguaggauucggccaauccuagcaagacggaucacucggaacaggguaggggacacgaaauacuuuucuaucagcucggcaagaaacauaccuaugaauaaacaaugagaauaccaaccagugaagaaaucaugcguuaaaauaaacauauguuucuucuaaagcuccaagguaagguucagaguccugaacccaguuauauuaaauaugacaacuauauauaauauauauauaauuguacauaauauauuauaaaucuuaauuuugaaauucagcaauaauuucaauuauaaggauuauaguacuuuuuuuuaucuuuaagagauguuuauaaacuacuuuuaguuuauguaaagucccaagucagaauuuaaaaagaaaauaaguuaaaaaugcacauuuggccgaacaguagcagcccaacaguauagguacaaguuuauauguauacagugacuuuuucugaaauugccauauucuaaauucucuauuuacuccuuuuccaucugaaaguauugguagcuuuugaugcuacuuucaucuccccaugaucuugguacuuacuuaaauuccacucuaauauuuuuauauacucauuuauguauguucuggugcauuucugaaaggaucccagguugaugcucuuuuuaguauccuguacuuaauguuguauuucaauucuuuuuggucuccuguaccuaacacuguaaucucagucuucuuauuuucagcuucucucuccauuugcuuuuuagauaaaaacaauacuuguaaaguuaaaaagaagagcucaagaaacuaaaugccuucaaguuuaaaugccucauucugaaaagacgaaguguaagagugugugugugugugugugugugugugugugagagagagagagagagaaggagacgugugagaauacaacuuuuauaccuuagccacacuaguuauaaccaaggauuauaauuagugggaaucaaaggcuauauacaaugagcuggauauaaggccaguuucuucagagaggggaguggcaugaaaaucuguccaacacaggugccucguuuuggauaguaaaauauugacccaaucauaucauccuguuuagggaagaaugaauaggcccacagacagaugcuuuuuacuuuacuagagcuuuaguuuugucuaaugaaaugagcuauugcucaugaggcuaguuauguguuccaggcuuugaaguauaguacugaugaugucccaugccaccuuauuucccuugugcaucauuaugauaaacccauuuuuaagguagucuagaaaaucucuacaugacacuugcagagaaccuacuauaugcauuugcuaauguuuaguccuugucuuuauucucuuuuuaugcaauacuuuuccuuaucuugaaaccacuuuccacuaauaucuauaugcuggugacuccaugucuauucucuaaagcaauuuucgugaguaccagacuacauuucuagucuuguuaacagaaccaucuagauacuauauugguucuucaaucucaacaugucaaaaacauuuuuauuuuaguuaauagcacaguucuaguucaaaugaaugagguuuuacuacauuuacacuaaguauauuguucuaaauggauagaauaagaaacaauacugacauauaguaggagacauuuuguuaaaaaaacaaacacacuuggauaaaauguaucaaaauauuuacagugauuaucucugauugcugggaugaucuugaaucuaaucuugauuguuucagcuuucacuuuuauuuaacugaauuuaagaacuuuaaauauuucuuaccuacaauggagagaaugacaaccacaaaaucaaaaauauuccauccaaugguaaaauaauaauggcguagagagaugaguuucaguacacacucuccaguaaauagcacaaugaacaccagauugaugcgugacaaaaugguagucacauauucacucuggucaucuguuuccaccaucauugugaccauguuaagacagaugagaaucaugaugcuuaugucaaaaacuugucugguuacgaagucaaagaccauuccuugaaauuuguucuguagagaaauagaaaugcuuuuaacaacaaaggaguuuucucaugugcauuagcauuaaguacuuucugcauuaauugacuuucuaguuucuugcaaaguagucauuggcccugauuuuuguaagaaugauuuauagcauauuaauuguuaaaauuuaguuauuuaaauugccauuuacuaauguguauuucucagaauaacaaucccuuauccaaagaagguuucugauaaaaacaaacaaacaaacaaacaaacaaacaaaagaaacauucaacacuguauacuucuuccagagguaugcaacacauaucaacauuuuaagauuaugaaaagguaagaaacccauuuaauuuuuuuuucaagacuuuccaaugaucagcuggaccauacauccauuuuaaaauauaguacuauuaauauuucacuuguuguauucucaaauaauuguuaaggagaauuuggaauuuccaagacacaucuauaacauuaugcauuuaaauaccacauauggcaauacucauauucuucuaccaaauagccuuggcuaacauugucagacacagaauccugaaacugcacaaggauaaugagaccagaaugacauuuccuauauguuuaugucaaaaaaaacuucacguucuuugucguugaucugugauucugcuucccauuucugccacugcuagucacugaaggccaucugcaggcuuauuucuuugggccacugaggaauucugagggaauuuuccaacuuauauuuuuccuaaauuguuguuucauuucuacucuuagugcuaaauuuuaauggagaaaguauauauuucucaucauucucaggaaggcaauauucaaucaucacaauaugaauauuugcuaguaguuuuuuccuugaugcacccuaggaauuacugaaaccucucagaucaucaucauaaaaauauuuauagugugggauaauagcuguacauuuucauagcaauuuguuuauuucaucauggaagcaugaguauuguuauuuaucaucauaaacuguaauuacugacccugacuucugcagacauuaguaauaccuaacucuauagccauacauaugaauaguagauacuggaauucuuuccuccuuuaaaacacuuaguaucucuagugaaaaauaaaauagaaguaagguguuauuucacucaacacuucauuucuuaaaauauuaggaaauugcauuucuuacagccccaucccaagguuuacuucuuucccugauauuacuuggcaaccauucuugaguugugugauuaacuuucucuugugcacaucacauugucuauguguccauuggccaauuaauauggauuguaauggggugcuucuaaaucucuugaagucaaggguguaucuucuauuucuucuuguucuuuuuuggucuuuaauuuuuuuuguuguuaccauuaucauaaaagauacaaacaucacuuuuagaugaugcucuacaagugaaagaaauuuuuucuacuggaaauguuagcuacuuucuuuuuugugagacaagcaugcaaguuuuuguuuuuguauuuuucccccauaucauuugauacuucuuacuccuggucgagguauaggcuuuugcgguuuuuucgauccuaauuuuuucauugcauuauaguauuucuucuguucuucugucauaaagaugucuugaccuccaaaguauagaaaagaaaaaucaaacugguuaaaacuguguccuuuuguacauuuuuuucaauguuaaaauagaaaauggauggcuaaaaaaagaaauacaaaauucaacugauuaguauaauuauaucugggauuuaaaauguaaaaaaaauuguacucuuuagguaugauaauauuuaauucccuaaauaauucaaaauugacuuuauuauuauuaucuuaugaagacaaacacccccaaaucucaaaaagguuaaguauuuuacccaagaccuuaugcuuagugaguggcgaaauuugguucacugagauaauaaauacuugguaccuuauacuauacauacuaccuuuaugauguuaaaggcaauaauuuucuuauuuaaauguagcaaagaguuagaggauguauacugcaagacaguuuggaguuacucauuaaaaaagucacucuaacucugucaagaauuggaggaaagggauaaaaagaaaacuggaugaguuagugagagauuuaggggauaaaucagagcucauagcauaguaaguaugggacagaccaguagggauagaagauuggaacacuggcaaguaagugaaauagaguagccugauauugacuuaagaauacuacugguaauaagaaaagggaauugaggggagaauguucuguagucuaagaaagcacucauucauuauacaaaaagcaaaccuacugaacaagugagaugaagcaacaguacauaaaggaagaaauacaaauggccaaugagcauuuaagaacauguucaaauguaauaaaauacauaaaagucauaacaauuaagguuauaaaagucauaaaaauuaaaauuaaauacaguuuucaccuauuaaauaucaaauauucaaaaacagaauguuuggugacagugagggaacgguggcauggguguucauacacugauauugggaguuugaguaguuauauuacucuaggggaguaaaauacuucauugugggaauuuauucucaggaaauaauuaaagccuuauuuucugucccucucucuuuuuuuuuguacaaaacuuucaacaagguacuauuuaaaucauuaaagauuaaaaacaaucuaaauuaucaaccuacuggggaaugaauaaguaaauuaugauaaugcauauaugaagacuuaacaaaaugagaaaauacuuauguuaagucuaaaguggaauuuauaauuauagauaaaaaguacaacaauaagaguaugugcagaaauacucugaacagaaaacaaaaugugaauggcagcaguuacuuccaagugaugauauuuauuuacuuuccauauguucuauaauguacauagguaauugggacaaucaaaugagccuuauaaaugauaaauaauagucauacaauucaagacugaaacggauagcuuguauuuaaauaucuuggagaaagaaaugggaauauauaaaagaaaucaaugacagaaaaaagcguaaaaauaaacacuagaagaagcuuacauccagugccuaauuuauugcaaagaauuaguuggaaaauauauuuucaagggggaguggguaguuguagggauaaaguaacaaauugcuuuugggaaagaggcauauucgguugcuuucuaguuuuauucuaauuauuauuuuuuaaaagauagaaaauguuucuugauaaugaauaagaggaggaaaaacuuuaugaaccuaugaacaagaguguggaacacaguuauucuuagcuuucuauagccggaaauauauggauagugaaugacagaggaagaggaaggaaaaaucaguuauaauauauacucccauuuuguuucuaaauucaaguacucauuuggcagagaaaacacuccaaggaauaauuuucuaucucagugggagagaaaauauuagaaauacuuaucuucuuuuucugcugguugaaauuaucuaugaugacaccaauaaacagguucaaggugaagaaggacccaaagaugaugaaaauaacaaaguaaagauacauguacagacuuucuucauacuuaggcuggaguuccaccuaccaaaggggaauauuuuguaaaauauuaccauacauuuuagugcuggaaaugucacuggugcuuuuucauaacaauagaaaaaauuauucuuacuaauaugucagcauuuuuuuuuuuucugaaucaacuaccucuaaaaaacaucccugaaauuggccuuuagggauguuuucaugugaaaaauauggcuauuaugacauucuaaaaucuauuuuuauaacuauaaauacaaauaauauucuuccauuugaacaguaaugugcuaaauuugcaagcuuuuaagguacugaauuuuaguaauuuuaaaauuauuaauaaaaaauuuaaaacuguaaauaucuacaggcuagguuuagaaacagucauucauguaugcaugaaauaauguagcaaauaagaaaugaguuguucauucagauguuuggcacuuuacccuaaaguaacaguuauugaauuuuucagauuaaguagacauagauggacaguccauuuuauaaauccucaguugauuauuuaauuccuagauugugcuuaaaacaaaugggcuauuacuuauaauuuaguaauggacugaaaggucacuauaguuuuuuaacagauucauguccuucuaaaagcaacaaaguuaaaaaccaacuaaacacacaaaacaaaauauaagugacaaagugaaauaaaacaacucuggagguuaucaaaaugauauucaacauaaaacuaaagcuauuugaaaugcacuucaagaaagauaacaucaaacucuaucagguugaagacugcagggacagagguuauucuuuaugaugauaaacuaaacagaugggacuugagaauagaaagaugaagguugauagaaaauacuacaucuuacaaaguuuugaagagcaaaguuggaaugagcaugaauuucaguuuaggucuuggagccugaaagaggcugaaaucaaauaaaauagguuuauauuuuggugauauacacuuaaaggaaucuguuggucacagaagugauugcaacauuaguaaaggcuccagucaauuuaugaaugcaaaaaucauauaaaaacauucuuuuauaugguuuaaaauaggauuauuugaaagaaaucaucacaguaaucuaaggcugacagaacaauauccauaacuuuucaugcugucuaauauggagggugacuauacauuucaacuaaugauagaaaucauauauuucuucaaauuuggucccgcacacuaaaauuacuacuaauuauauaauguguggauaaauaggaaacaaaauagaaaauauuuaaaaggaaaauauuuguuaguuacuaaauacaugaauuuguuacuuugguuuucaaaauaauucauguguugaauuaucuuaguaagaucuuucugauaaacauugcuaugcuugaauauuuaccugucacacuuuuucccaaauauuuuaaaucaagauagaaucauuucauuuggucguuuaugcuuuauucgauuaauuuuaccaccugaucaauauuguaaaaagacuuagaauacaaggaauacuuacauuucuggaaucaacugcugcauacauuauauccauccauccuuugaauguggccuauuaagaaggacaugcauguuuuacuuuggaguaaaaauaauuuagaccugauguuuaauaaauauucuuacugauauaauuuucaaaagggaauauuuuugaaagacauuucaaaacaaauuuuacacagauuuuggaccaagacaguauuuuaguauggcuuuucauuucuagaacacauauugaacaaaauggccauuugauauauccuccccuugauaaccaacucacaagcacuuuucaauucuuuagaguucauggugucaugauauuuaaagcaguauuaaaauuugcuggagcacuuuuuagaaagucuuacaaaugccaacacaugggucaauagcucuaucagccaaauaauuacaacuuagaucuaaggaucaucugcuaaaauuuaucugcagggugaucaaagugauugaaaauuuaagauuucucuuuauuguaacaauguaaggauaguaccaggauacauaaaggcaggguugcaacuauccuuuuaagaauuuuggagcaaaacauuuagaaauacaauccuuuuaagaauuuugcaucaaaacauuuagaaauaacccccuauucuauuuucuuucugaaauucuugaagauaauaaguuaauaugaauaagaaaugugaacaauaguacagcagacacuuggcacucacaggaugaaggauacucaggcuaacaacuuacaguaauuuguuacuuguccuggggcaugaauuuugaguccugugggccuaaaaggauuaucccuuagcuagugagggagguuagcaaagccuuuagcgucuguaucacaauauaucuuuguucugauaacgcuaacccuugugaggugguggauuucaugagacaaaagcuaagcaagggugugggugacagcagugaaaagaaaguaaugauuccuagcuagaaaguacaaggcuuuuguauaugaaagagagagagauguguuaaauaugucaguggcuuaggucaaugauagaacaauuccauuacacacuugguauagaaacaaaaaagugauucaagggaccauuucaaugacuuacuaaucaauagagaggugauucuauaaaagccaaaugugaagcaguauuuuagaggguuuuuuuuuuuuuugguggcagaauuuauuuaauagcuuugugcaggaccaucacuguauuuucagaauugcuuacauuuuaaaggauugcuuaaaauuuuuaauuuuucuuuccucaaauuuauggaggaggugguugcuuuagugauauuuacaaguauggucauuaguuaaggguuagaauaagugcccaaauaaauaucaucaugugucgacaauuuuuaaagaaagcauucuugcuagauuuuuuuuaacuuuuguuuuuauuugucuuuagagacaaggucucacuauguugccuccacuggucuagaucuccuggccucaagcaauccuccagcuuuggccucccaaagagcuaggauuacaggcaugagccaccaugccccacccguucuuaccagauuuaaaaaaucucuauuuuaauugcaugaauauuauucagaguagaucaaaaauguuaagaagagaaauaagaauuuccaacaaaaaggugggaagaauuuguaaaguaaucauaguugacaccucuggaagagcugcaaaaggguuuugaccaguguugguuuguuugcuuaguuagucuucugguugaacaguugaaaucauaaccuuggugagcaaaaauugauuucugcccuaaagacacuguagaaccacaagggaagaaagaaauuguacagucuuuuuuuuuuaagcugaguuuucaaauaaucuggacucuuauuuuauucccugcuuuguuguggugcugcugcagcuagaagcagaaucaaaugaaaauguuuaaagggcuaccuuuuuuaaauauaaauuauaaacuauuuuucuuggagacccagucuuagagacccaguagugaaaacauuaauauuuaggacaaaauagacuuaaauaauggugcugaaaggucauuugagauaagacaacagcugcuuuugcuucauuuuuguuucuaguugcuuccagguauaauucucucucuuuuuuuuuuuuuuuuuuuuuuuuuuuagauggaguuucacucuuuguugcccaggcuggagugcaguggcacccaccgcuaugccugguucuaauucuaaaaccuaaaugucauuccccaaacuuugauccaaauaauagaacucagcagcaguuaaucccuaccaauuaauuacaauccaauuagguguauuaaguguauguguuuuggaagaugaucuaucuguuaaguguauuccguuuugguagcugaucagggaaacaagccuucuaaucacaauaaaaaauggcaaaguuacugauuuauuaauuuacuuguuuauauagaaagagcaauauagaaacaaagaaaauacaagaaaaaagacaaagaggucuuuguuuggucuggucacuacugacuauaucugcaguccuuacauguaauaaaguuuucacccaucugggcucauaaacuuguacuaacaaauugaaauuuuuuaaauagaaagaaauauauacuuuuucuuaggaacuaaauaauagauguaugucauuauuuuguuauuauuccaaacaauaaaaauauucagagaaaauaguguucacuuacaacuugaagcaaagagagauacccaaauccuacauuaucaaaguuuacuuucacauuuuuccaucgagcagucucauuucuuucuauuaguuuuaggcaaucaguaugauuauucacgucuucgaugucaaaccugucaccaguugugguguuaauacagugguagaauuugccagcaaacaaauuuacgcccaugaugcugaaaauuagccagaauauaagacaaaccagaagcacauucaugauggauggaauugcuccuaaaagggcauucacaaccaccuaauacacaaauggaaaaaaagaaaagucagaauucuuaucuguuaauaaagaaaaaaaauuccccuaguaaucucuggucuuuccauucuuuuuuucuaucaaugcuauuuauucuaggauauguaaaagcaagguucaaaaaaaucuuaaaauucauuuuuuuuucuuaagcaauacacuuaggaaaacaacuauaggcaauauaaccaagaaaugaaacaaaaauguuuuuaaaaaaaagggagggagaagcauuaaaagguuaaaggaaaaggaaaaucagaggaacuugcugccagaugaagucagaauuguguuaucagaauaaagaaaaguuaaaaagccuauacagaaguuuaacucauuuuaaaaaggcaauauauuaaagaacaaaacuaaaacauuuggaccugaguugauuugaccaauauauuuuuaaaauaacuuaaaaauucagaugauaaauauaaaaaauauuauuaaauaccuaauauaauugucuuuaauuauucaugcauugcuaugacuaauaauuuuugcauaagaagcaagacaauuugcauuauguauuucauuagaucaucacaucguuuauuucaagcuccagucaugucaguuguuucauuuacugaguuuaauucaaaaaacuuauuucaaaugaaacauaauagaaaucauuucuuaggaaaauaagaaaaagagggaugccauacauaguucucaaaucugaugugaucacaugaaguucuguguucaauuauuaucuacuuuuuuuuuuuucuauagaaggauguuuucccccucuuuacuucuggaccacuaguuaaaaaucuugaguguucauguuuggaaacaacauagggauggcuuccuugcuuuuuccuccauaccucccacuggagcugcacaggaguggcuaagagggaagcuaaaaacagacccuaaaaugcuuauaaggggcagcugccucaaacuuggacauuaauagcuaaguuuaauuccaccuaugugcuuguauuauucuugucagucugauccaauggaaguagucgucaaaacaucuucuauuugccauuugaugccaguguauuuuuagaacaauuuuuuuuaacugccugucugaaaaaaaaauacaugagccaauuucuuauacuucugaucccuguuuaaagccuguaaagaacucuaggccuucuggggaacauaaaacagugugauaagugggccaaagaaaauaagaauaccaguaaugacaaagguggaggggaugaguaugaaaaauuaauuugguugaguuauccaggcagaaccaaaugauguggccgaugcaacuaccaagcugacacgugacacuuugccuuaucucaucugacugucugcauuaauacaauggacuucauaaauucucguuauauaauuuauuuuaaauggaugaauagaauuagauuucuuucagauuagagauuuggaaauugaaaucaaguuacuauuucccuucuuuucugaauauuuuguccacuauccagauuacaaugcuguuucuaguguguauacacagaguacuaauuaaaauacguauuuugccuucaacacccaauuuagaguaugagcagaacacugauuaucuauaccuauuucucgauuuucuuuucacauuaccugucucacauuuuuucuuugaaacguuucucagcuuugccaccucuuuuccauucucacagucaccaccuagaacugcccucuguuauuucauacuugcacugucaucugucuccuaaccuucuccuucauuuaaucuauguaagaugaauuaaucuuccccaagucccacuugaaaguuauuuauuggcucucugguaacuaacaaauauuuuucuuaccuugguauucacaucacuccacaaucuauauuuccaguuuuaacuucccuggucaucuauacuucaugccacuucaauuaauauaauaaccgugugcuaauauaauugccaggugauugagaugccauuuacauugaaauuccuugucuaauagcuccucuucugaaauacucuccccucuuaaaggcuuuaguucaaauagcacuucuuucauggagccuaacuuugucccccaguuuagccuccaaaauaaagaggaauguuuuccccuuugaauucaagaaucagaauucuaguacugaacagaacuguacagauaauucaguauugcguucucauuuggcauaugagaaaaaugagguuaaaacaaguuaaguucagaaaguagccuauaaauagcauuuagugcuguuuccagucuacguggaagaguugcucccacuuaucugguacccauauuacucuguacuagaguucaguguaauccugacagauuguaagauuuucuaaaaauuuaagaugcaaacauauguucgugaaucuuccagggccuugagugucuugaauauaagaacauaccagagagcuuugaauauaggaauaaaauaaugguugacaaaaaugaauggguuaaugaagcaaaguuuagauuaguauuuauugaucaaagcauaauuuuuaaauguuauuucugaauaugggaugagaauaauuaaggaacugagcacagggagaaguuugugcuuagguaauauguuugagagguuuacuuugaaacuggggauugauuuagaguuaaagcgaacucuauggaauuuaugacgcaagcauguacucugcagcagugcacuucaggauaugauuugcaaaguuggcauacauuuggcccagagaaaaguuuuauuuuuuuugugaacauaaaauaacuuuaucuuagaaaacaucuggcacaguauuggggaguuuauuauacaaagcuauagucauauuuaugauguauuaaauuagacaaugaaagaucauagaaaagauugucuuuucccaagaguuccaagccauuccuugguucagcaaagaaggagguguauuaacuuuuuucagucucaauaaagcugcaguaauugguucuuauggggggaagaaaguaggcagaauuagucugaauaaauuggaaagaacaaauuucaaauugaacuuucaggcuacaugaaaggaaaugucugagaaaggagcuaucuuaaugaauuaauacuguacuagagguuguuucuucucagaagcuuuuuuuucaaaacaaucaucaaauaaaguuucucuacucuagcacaaccaauucuauuucugguucauuaccugcauuuuuaaaaauaagucuacacuaaaugaaggauugauaauuaaauaugcaaauucacauuagaaauuuucauacaugcagaaaugucuuuuuaucugaauuaauuacuuugaacuucaaaucaacacuauucaugaauucuagugcuucucuaauagaaauaaagaaaaucuaugugaauaaaaauaaaagugggcaaaguaggaaucauccauuuuuaaguauaaagaagaauaauagaaucuuucuuaaaaaucuaaaaaaauuauguuguggguuuuaauuaagacaguuuuuuuguaagcuaugauauauuggugauccaaacaaaaauucugacuuuuucugucucucgaauauaaacucuucuucuuguauaauacacuuaaacuuuaagaauaaauaaaauguagaguuauguuuauguauguuuucacuguguuauguuuuaaaauccuagaaaguuaguugggaguuacuuauucuaagaagugaguuuaugccuuaaauuuuaucuuaauacucaugauaagacguuuuuguuuuauuucuagguauguauucuauucugcauaauucaaauaaguggauuuuuuuauucuaacuuuuuguuuacaacacaauucacaugugcuuauucaacuauuucuuaauauauuuuugccuuguuaacauuuugaaaauaaccccauaugaacuuacacaauaaaaaaugagaguggucacaaucaauaccagucuuaugaaaccugaaauauugcacccuaguaucugcucauacauaucaauaaucaacugaugguaucuaacugguaauuuucaggacccagaccaauguacuaaacagcaggggcuguaugccucaaacaguaucaugagcuuaacaaguuaaauuguuuuuucacauaaucauucuacaccagggucccccgcccucaccaauccaguaaucuccccaaagauggauaacuccauauacacauaacuaaaucauauucaaugaaacuuaauaaagauaucaaccauugggguuaaaauccacagaggguaaauucauaaagguuuuuuuuuuuuucaaaugaaauuuaagacaauugaaaagaggggauuaggauguaaauaauguauuuucccuacuguggugcaauaauaguacccuucccaaucccucccucaccccacuacacauaagucacagugcaaggauuaaagguagcaaaagggguaauacaguacccauaauaaagggcucaggggaggaaccagcgcuccaccccauccaaguuggagcaagauuauccuauacaaaauagaaauauauaguuuguuauuaguuagaaaucugauaugacagaacauuugguguuacuuuuuguucaugaugcucuccgucuguuucccuauccauuaagacuugaguucuuuugaaaaagaagguauuuaagauuuccuagguuaggaaauuaaaaauacaaauuuaaacacaaauuuuauuuuacccuagauauucacgacaucaauucacucaguuuaauuuuacaaguugaaaaauuuggacuggaaauuugaaauacaauaaauguuuaaaagcugucagccagaaaugugcauaaaacaugcaaaacacaaagugcaacgugaugauaauuuauuuguuacuuucuaacuucuuaucaagcacuguacaacaugcuuuauucaguaauguugcauaaaagcacaugcuuugaaaaaauaacagaacaacaaaaauaaaaugagugccugaguuacgcuuugacgcagcuauugugauuuuaugcugcuagggcaaagaauuaaaugagaguuucugagcauguucaaaucucacuucccaaucauaaucaucauucuuauauccaaccucaccaucauucaugauuauauuuuuacaaaauaaaauauccaaacacuagaaguauaaaaaauagaaucaauuauaacguuauuuugacucuacaaugccaaacacguauugaagagauuagucauuuuagugcuguguguauguugucauuaugaggaauagagccauauucauaaaucugaccauuuaaacuauuaguuauaucacuaucagcauuuauaaggauuuuaugucuaaaacuccaaguuucaaaaacuaaccucuuuuaauauaaaaggcauuauugauuaauaauuauagauaugguuauuucugagaaaauuaaaaguauaccgauaagaucagcuuuuuuauagaaaugaaguguaauguauggaaauaucugagcacuugaccaaugaauuuaauaaacuuucaaauggucaaauguaaaagguuuauaauauuuucaaauguuuagcauuguucagauuucacaagccauauaaaauauauuauuuugauucaggcaacauguuuucaaguagaauguacacaaaugacauuuuuuuucuccagaacugaaacugccagucugaaacaaaacaaagugacauuuaauuggaaaacagacuuaauucuuauacaccccagagauaauuucuguuaacauuuuggugaaaauuugaggcucucugugagaaauaaaagaggacuacuuguauuauauuguucugaguugucgauaaugaggacaaaguuuucauauauguuagggaaaucgaagacaaguccuacguucuuacaaagugacauuuauaauaagacuugagaagagaacauaaggcuauaaacaaucuacaaagugcaaauggaagucuacaauacagcuuaguuuccauaaaaguaacuacaccuuaggaggugaaagagcaguguuuuucuauuggaaucacacaauucaguguuuuguuuugauaauauuuuuuuuuaaaaaaaagcagaacuaauuuuuuauauuauauaucuauaaacuaaugcuucaugccguaaaaaaaggcauggaaaauaagucaauaauggcaaaauuucuaaucuguuaugcaugauggaaaaugauuauugcaucuuugaaaaggauaaaauaacauuuugugugacucugaccaauaagaugcaaguuaagguuaauguauaaauuaccuauaguaaugagucaaaauuauauuuucuguucauuauaaguguuuuacuuuauuguuauaaaaaugauguggauuuguauguaaucuuuaaguuaguauuacuaguuuuauaaauucagucaacacuuaauaucuaaccaucuaaucuugaauauauucaaauaaugcaaacuuuggcauuauacagacaaaaguuuuaacaacuccuuucauuuuuuucuuaacacucauacuuaggcacaugugugauucacauuauuuucaggaaaacucguuaaguacaguauaucaucacaaagaauaaguaccugauauagaauuuacuuuagauuaccauuauaucauuacacauaguacuuuaauaaugcaucagcuuuuuuuuguauauagauuuguaaggaaacucccaagauggauuaggaaauaaagucauuuaaauaagcacagcagauaaaugauauuauaucauuucaagagaggccuauuucucuugcauaucaccuagaaguaaauaugcaacagauaaaacaauaaaguagcaauuuugcaagaauuugccauuccuuuugcaugcauagauuuuccuuuuucuaaauuuaauuuaguuuaauuuuggcuauauacaauacuucagguucuuucauuuuucuuacccucaucccuucaaaucgagauaaggcucuuagaggucucagagcucuuaguguccugagagauuugauggcuccaaguucugaguaacccaaggcauuugcuguuaaacugaccaaugaaaccugcacacacaaaaauaauaacaauuaauaaacagaaucaucauucaauguguaguugcuauauaauacaacaaguauaauuuuugcuuauaauuauucagaggauaaauguucagacauuuucaguaaaccuuuaaaaaauuaaagaaauaauuucaguuugauguaaaggauguaauuuuuaggacauuaauuaaaagcuaguugaaaaaaaauccuuaaaugucauauaauuuaucaacugaauaaauagaaaaaaaaagcaaaguaaaaauuaguaaaauaaaagaagaaaucaagguggaaaaaaauucauuggcuauucuuccuuuauuuuauuaaguugcuguugaauuuaaggcuuuucuuguagcuaguuauaaaauacaaaaacugcuguuguacuaaaaaaagcaggaaguuucuacugugcaucaguauauucaacuaaucauaauugguauucucagaaauuaaugaacuacaucaguuuugaaggugauauuuugucuugguaauaccuugcauuuucacuuguuuauuuuuacauaaguaacuuagaaagaaauuccauuacaaaacuuccucaaaauuuuuuauacuaauuuauggcuucugccaugauaucuggccccaaagggccaaucaaugaauauuuaccaaauacacacagcaauaaauuuacuucauuuguauucauuuguagguaauauacaugacuaaaggaaaaaucuuacguaucuaauucucuaaauaaggaauuuacuaaaacuuuguauucaaggaagauuauaacuuauuugguuagaaagaugcuaguauuggagaauuccgcauauacugcacacuauuuuuguaaacuuuucuuuuuuaaaauguauuaauuguaucauauuuaauauacuucuuacauuauuugagaugugcuguaauuaguccuuuuauagagugcuauacugaucuucauuaaagaauuaaaacagaacauugaaaauaaagauauuauuguuacaaacuacaaaauuuucuauaaaauuauuuucuuaaaauguuucaaaaaugacacuaaaaaacuuucaugaaaaagcugauguguaauaaacauaauagaaaaaaaaccucaggaaguuuuaaaggguuaaauuacauuuagauuuaaauuauaguguaaacaauucugaaauugaaacauaauguaacuucuaaugcuugaaaccucaauauuacaaacuuucucccuuauugaugugauaaagcaauucuuccuuugagauuucucucaauuggcucauuucacaguaacauuguuaaguuuuuuaaauagcuuaguuuugccuuuguucagggucaaggaaauauaaugcauucaugauucuuagcucaagaaacacuuuccacaagaaacccucauagucuugcuggguuaguaucuuuuugggguaaaacuacucaauaugaaaucaggauaguuuugcuguagcuuucuaaagcugaaauuuugccaaguugauaauagaaaacaugaugcuuaacuuuaacacaucuugaagucagucacuuguuuucaguaaaugcaguauuaaucauuggggauacaaauucuauaaagggcuguuugggcuugccguaaaucuaguuuacauucuaggaaaacuuucacugcugaauaaaguagacuucucuuucccuacacucuacauaccuuacuuccuauaaugaagucauaauccauauaaucuacuauuuaaaucuacucuuuaaaaaguuugaguagaucaaauagaauuuuuuuaaaugacuguagcacccaacagcaucacuguuuuuauugagugccuuuaauacuguacaaguugggggucaagaguuuggggccaagaaacuaacucaguggcacaaaaucaacaagugaugguccugggauacaaacuugagucugucugacucacaacauaaaggauuuaagcaacauaccuuuuaaguucccuguuucacuacuuucccuacaaacugcugauguguuguuuuuucuuuagcuuucucagauaacuagagaacuaccauagauuccaucccccaauguuauuuuaaaucagaauuaaauuagcccuugucuuccagaaaugacacucucauugcauauaugcguuuagugguuauuauagucugucaacauaacauaguggucugagacucacuauuguagaauuugaauauaaauaagacaagcuaccuugaacagagacaaaaauaugaacgauaccuacaucaacaauuaagaaguccagccaacaccaggcauuggugaaauauguuugauagccauaugccacccauuuuagaagcauuuccagaaugaaaauguaagugaaaaccuugucagcauauuccaacaucgucuuaaucgucuuucgcugaucaauauauauaucuucaaaugccuauaaagaaaauguuacacauuauuagcuuucaaaaauaauuauacuccauaagcuauuuaaaaaauuaaucauaugcauaugacauuucauuggaauaggagggcagagaaacaguaguuacuguuacuuuuuuuuuuuccucgcaaaggucuuuuacuuauuuaaucaggggaaagacuauugguggaagaaaaagaaaaguaugauuccaaugaauuaauuugacuuagucaggaaauaguucuugauguuguauccugauguggccaucccaacuugaaguuauguauuccuuuuguuucauuuauuuugcuuccuucuauuggcuuuuuuuuuuuuuuuuuuuuuuugcuauagaaaggagguugaagaaauaaugaaagcuugugcuuuuguaaagcagaaauugugauugaucuucgcagucuccaauuugacuaaauaguuggguucaucugcuucuuuuuuguuguuguuuguuauuuuuuuaauaauuuauguuucucaacagacauacagugugacaaugauuaaaugaaauuacuuuucauuuagauucuaauauauauucuucuauuaugaaccucucgauguuucacuucuaaguaugcauuccuuucaacggugaaagacuucuaaaguagcguguagaaaauauuucuuucuucagaaaaauuacagguaaauauaugucuguguuagaauuauaaaaaguuaaacuuguaacacacuugcauuucaaucaggcaaacucuguuucucucucuuucuuucucuuuuucuaucuaugguauuuccuuuguguuaguguuucccuaaaaugcuaucuguauguuuuauuuauaguuuuauaaauaauuuuccuauaaaaauaaauugauucugaugaagugaacaccuuguuauaaagauaaacccauccuuaaaugaaucucuugggcaugcugcccaauauuuauuguuaccaacuuucauuauuucuuaaguagcacaaaaauagugagcacacaauuggaaaaagacagagaaguggucccuaaggacuuacuacuguccaucaagagauaauaauaauaaauaccauuuagaaacaaaauucgucagaacucagagaauauauauucccaucccagggcuuccaauaacuuuuuuuaauuaaacaaugaguaauugaauauucacauccuuugguguuaaugaauaagcugaagggcuacacuuucugggcuauuuaauaguaagcaaaaauuaaugauuagcuucuuaaaauuauauuuacauacauaguaaaaguuaauccagaaauauagaguuauagaguaaaucuauagaagauacaaggugggauaauuaaaaaugcauuggauacuaagacaaugaaacaaaggauuaauaagucaucaguauuagaguguucuaaaaauuagugcuguaucaccuuuucuuaaucucacucaccagagcaccacuacuaaggagaaucaugaaaacaaugaaggucucaaaccaguuauguucaacuauucggaaacacguccuucucagguuccaccauuguuuuccucugccuucuuccacauugauuugacaacacuugaaucuuuguacacagccugcagaaaguguugaaauaaaaguagauaaagugucucugcuuccauaauauccuuuagcaauguccuugucuugucuuuuuauuacuaugcucaucucugucuugcuagcauagcucucuaagccuagaguaguaagagcacauucaucagcugugugaaguuguggaaacauucagccacuuuaaaugaugcccuagcggacaguauuugcuuugucugccucacaguguuauuguccaagagaaacuuuguaaauuacaaauaaaugugagguagcuuuuccuuguaccauaucauccuguugcacucuguugaagucacuccagaaaagaacuuuaaauuggacauuaauaauguuaagcagaaaacuucccuuuuauaaaggauauagaguaaaaauguagaucucuuccaacaaugcugcauuuguuaccauuuaggauuuuuugugaugugccuagaagggcuuauguaauuugcauaauuaauuuaguucacuaaaagcuaauuuguaugauuuggcuuugacuuuucauugccuuccucacacauugcuuucacuuagucuaaaugcaaucaacagguacuucugaguaccauuguaagcacaaaggcacuuagguacacacacaaaaaggcaccgaacauguaccuuacucccaagaaccuuaccaaaaaaaaucugguuuucaaaaaaaaaaaaaagaaaaagauauaaauacaggaucccugcuccaaggcaaaaaaaaaaaaaaggaggaaaagauauguuugaagaaaaaggagaaagggaaugaauggagaaaaggaggaagaaaagaagggaaggaggaaagaaggaacuaaggagugaaggaauggaggaaaagaagagaaaaaagauagaaaaguaacauguaacuguucaaaaagagaaagaguuuucauaggauaauguauauuaucggguaaauuaaauggaaauacuucuuacagccauucagaggaacaagcugcuguuccaccauggucagaugagggcaguuuugaaaaggacauuaagugauaugcaugauuuguauagggaauagaagaagacugaagguauacuaggccuaugaaaaaauaacaucaaauagaaaguaugcauauuuccaaaccucaaauucccagggauaucagaccacaggaaauauuaguuguaggaaaaacauaucucuucuaucuauugcccauacugcaccaggcucaacuagugacuguuuagguauagaguuucuagggcaguauuuauuccccauuucauccaacaauuauuggaaacugauguuuucauuaaagaaacacaauuuagcacuagcaauccguuuaguuuuagcagucagaaaguuacuuuuaaggcaaauucuguguaggaucauuuucaguagugucuaagaugccaacuuauugugaaaucacuacuuacuuuaaaaauauaaguuagaaguuuugaugguacuaaaauauuuuuccuccauguucuuaaucucuuccacauauugggcagauauaaucaaagcaugacacuagacuuuaaguuuuuuugucugucaacauauuagaggugauugaauuauaucuauuacaaagugccauuuuauuauaugugauuuauuuuagcugaccaacagcuaaacaagcugcacuccaaaugaaagauuaacauuaggauucuuuucuuuaccuucagugaaacaagcuucugguucaagaguuucuucagguuccacuacgggcuguucuucuacaggugcgccgauguccacagugcuaccuucugaugagcuacugcuuucauucaguuucuguaagugagauggacauagaaaguaaaguccuuuaauuuugguaauaaguugccugccaagaaaggauuauuacuaugaauuuguuuuuuauucuucuugagguagagauauuuuuagagaaaaagagagauugaauaaggggaagaaauaagaaaaucauugucugugcuaacccuuuuaccauaauucacaauguaagcuugaaaucagauugcuauguuaugagguuacaaaaggccaucagccacauguacugagcaaaacacugccuuguggauuagagaagcaggggacacagggaagagaagagggaggaagagaaagggaaaaggagcaggagagaaagagaaagcuuaccuuagaagaaaauaaugucguuagguuauucugcaguuuaauguuugacuuuacauauuucuuuaacaaugucuuaccuguguguacagauacuaccuguuguuuucacuuauguuacuaagauucaugguuaagguguucagaguuauuuacuauaaauguggucauuuggagagaaauuguuauaaaauaugucaaaaauuacaucaauaaacaaccuuagagauauuaaauagacaucuucaauuucuggcaaguauuuuagagccugaaguguuguaaaaugagauaaauagugugugggaaaauucaguuuccucugacaaaucauguuuauguuaaugugccaugugaagcugaaagaacaaaaucuaguuaaacaacaacaacaauaacaauauccuucauauuuugacaauagugaugggaugcacauuucucuuucuagaguucucagaagacaaagauggcagagauaauagaaaauauuaacuaacauauuaagauaggaaaaacucaugacgcucuuucugaagaccagcaaacuggcuuauaaguuuuuggcaaguguaauuaauucauuaauuuauucaacuaauauuuuuugaacaccaacaauaugcuaccagcugaguauucacugauaacugaaauaucuauuguccuuauuggaguaucaaaucuaguacaguauuuucuaaacuucaggcuuauguagacccgacaauaggcauuccagugcacacagcagcaagccauucaacccguuaucacgauauuguaaauaguaaaaauuaaacacaauauuaaaauuguuaauaugaauuucacauacauaggagaguguugauauuucaguaaaaguuucaccgaaauauuuguauuugcuugaagaaggauagcuuauaugucuggguccauaucuaguugccuucuuuccuuuccuuuuaauuucuuaaaauagaaaaacuuaccugacaguuacagaaaauuaggaccuauaauggcauguagcucugucauagcucugugaauucagguugaagaugaucuuugaaauuauaaaauauuucucacugaagacuaauuucaacauucuaacacauuaaauaggccugcauacuaugcucagaagcugaaaaguugauuguucaacaugauagacaguaguaaauagaucauaaucuacuuucggguugcauuuagcuuugacuaucuuuguguucuguucuagcauuugcacugaauuuaaaacauauccaggaauaagucauugguuucuuccucugacaaacgaagagaaucaccuaguggcaggcguuagucacauucucaaucaaacuacucauaacaucacaugaucuucugaagaaauucuuaugucuuauccucaacauuacacagauucaucauuuggccguaaagugauaggcuaagacuugucacuucaacaagugccuucauauuuuaaaaaugaccuugauuggcacuauccgggacauaaugaaauucauuacauacuuuauaaaaaccaugugagcaacauuucaucacccauuguucuucacuguagaaaagcaaaugcccauucuucaugaaacaauuagagaguggaauuugagaauuuuaacaauuuucgccaaaauuaauuaagaacuagaaaggauauuauuuccugugaauaaauuuguguggagaggcauucagguacaaagaauuauaauagcaaaccuaccuucuauauauauaauuguuaucugcuaggucugauccccacauaguuuuccagucuauaccaagacucacaaaauaauagaauauuagcauaaaaaucuacucuucaucaguauagguugucaguaauaagcagaacaaaaaguugcucaguaauuaaucuucauguaagugccacagauaaaugauugauucuuugcacauaaguguuuuauccaauuguaaggugaauuagauccuggcaugaacauguacauaaaaauuguucuuccuugauuacuaguaauaucaugcaauuguuauugcaugauauuaaaguauacugauacacugauaauaaaguauugccaauaacuaguuuugcuuuuuugccaaccauauuuguuuucuuaugaggaauacuacuuuuaaugauaccucugaagcauugauuuuuauucugccuuuaagugaaaccacuuauucacuuuaugaauuaaagcauuguuuuuuacuuuuucuaagacaaagacuuaucugacuuaccuaaguugugacuauuuucugugaaaauuacgagaacccaaaagaccuuauguuacuuuuugacacauuuucaaaauggcauucucugaagaagacaaauagaucaacaguucaauaaguuuuaauauucagauauucaucuuauauuucuuauuuagacauuuauuuuuaggaugcuuaccuaagauggucacucuuacagaauuacuuuuuaaaaauacauguagauuuaugguucuucugauguuuuuucauuagagucucaauucacaaaaaaaccugaguuuuaaguuuauaugauuuccauuccuauuuuaucccuuugaguuacucaaccaagauaguguaaugaugauguaacacaauaugagaauaacaucaaaauggaaaauugaacaauauaagaguuggcaugcaauuggacauacacgaacucuacccugucuacuaaauguuaggaaaguaaaacuuacuacuaauuuuaaguacaugagcaagcgcuuguaaguacccauauuacauugguaacucuugaagaauguaguggauauuaauaacauaagauuguaugaacuguaugauuguaugaacauuacaagauaauaugaacucuaaauuaucuuauauuuaaaauauguuaaauguuucugaauaacuuugcuauuucaugaggacuacuuuauaaacaaacugggaccaugggugggcuguagauccaggaauuggugaauaguguuacuucuccaaauuguaaaacauuaauggcaaagccaaagauagucacaauggauggauacaauauacuucuaagugugcuuucuuuuuuuaaugcauagagcuuggagucacuccauauuucagaaauuuuaaggugauuuaaaagaugaucaaaugcccuuauuagcauuccaauggaauaucugcacuuggaaaguucgcaggucuagacaagugaucuucuacauguuuacaaauuaauuuuaaaacauuuuuuaagcaauauaaguauauucuacagucugucugaacuacuguaggaaaguggaggugugccuaauaauacucaaauuuaguaugcucucaaucuaaguaaugacuuuuuaaacaaucuuaaacauacuucuuuaaccaaauuccugauucugcaauaucacucuuucagcacccagacucaaauuuuuuuguuuacuuuuacuuauuucaaacauuggcaguaaucaaaagucaguuuuccuuauuuuaucucugaaauaacuauuuucucagucagauuccaaauuccuaugaaauuucuguuuauucuuguuaccuuuucuuuguuuaacuauaaauaaaaauggccauccucauucuagccucaugugacuuagaccuuugugguccacaaagcuuaguguauguauggugaaugacuaacaaacauuuggugaaugaaugaauagaugaauaccucuguuucagauauuagugauggaugaaguuuuuguuuucaacuuagaguuccaaccaaaucucccaaauuugucuuucacagauagaagcuguauguuaaucaaggugaacuucuuuuuuuuuuuuuuuugagacagagucucgcucugucguccacgcuggagugcaguggcgcgaucucggcucacugcaagcuccgccucccaggcucaugccauucuccugccucagccucccaaguagcugggacuacaggcgcccgccaccaugcccggcuaauuuuuuguauuuuuaguagagacaggguuucaccauguuagccaggagggucucgaucuccugaucuugugauccacccgucucggccucccaaagugcugggauuacaggcgugauccaccacgcccggcccaaggugaacuucuuaauguucucugacuuuuucuccuagugauuuuuccucccaucauugcggaagaguaauaauugcucucuuauuuaaaccccuuucaacacuuuacagggacuacuuugggcauauauuuuauuauaacuucucuucauucuaauggacuuacuuacaaaauuaaugacacuugcaguuuucucaguaaaauacaauaacugaugaccuugaugugcaaaaauugcucaggucguuggcuacugccuaggauaucugcacauuucuauuuucaccagcugaaugguaugcuuaucaagaauaaguuauguuuauuuucaaaucaauuuacacuauucuaaaauacuguaaguguguaauuuaaucuuguagaauuugaaaaaugcauuuaaaaaguguuguuguauuuauaaaaacuaagucaaaaucauugaauaaacguaacaccgguaaaucccccacauagauacauguacauuaaaaaaccauaaaauuaggugugaauauuuacuuuuuaaauaguuacaaauauaaauuucugagaagauacuaaauucagguugcuuuauaugauucguuaagauauuuguccucugggggaaaaaaaaaacuaaacagaaauaauagaugaugaauuacaagugcagcucaugcuaaaacauugauguagcacuccaaacaaugaacccaugcuggaacaaggcaccuaaagugacauuuuuauacaugucauuuuuauuuuguaaauaaauggagcaguugaauguuugggauccagagaaguguauacaucuuucaggaacaauauaugauuaaaaauuagauuuaaaaaaugguauucauauuuggcuuaagcucuacuucgcaagucagcauuuugcaaagggaggcugguaagccacaucauggcuaacccuuaugauagacccugauucucauaauaguaagaagaauuuuccccuacuuucaaaucauaauaacaucagaaaaagugacaugugacuauuagaaagauuaaaccauaagcaguggggcuuaugucaaugaauuacucuagauaaacuaugauaaccugagagaaguguuagugcuuuuucuagaaauuuauauauaauguaaauaaaugagcauuaguguaagaaaggaaagaaaaacaaacaaaauaaaauaaguucacaagugaccgaacuaaacuguuuuuagccaaaacauggggaacaacaagaguuuugauuggcauguuaaauaaggaauacaauacagaaauuaaaauuaaauuaaacaaauaguaaaccuuuuacauagucaauagauuaaaauaaauaaaaacauuaauauaaaagucacccagaccuucucaaagaugauaguaaguuuauaaaaacaagaaaggcauuaagcuuaaacacauaauuuguauaaauuauuucuaaaaugcuauaugcuuagucuuuaauguacuuuagaacuuagagaaagucuaucaucugcagaucauaaguuguacagcuaaauuucaaucaacaauuauaccaacauucaguauguauguugcaaugaaaggcaucuguccuacuaauaugacagaagagguguuuccagccaauguucuccagagaucucacuccagccuuaaguggcugaaggcuuuaauucaagcagggaaguuccacuuucaucuaauuuaugcaugauacaugaaaaaauuugauuaaaauauuauuuaaaagauuggaaaacucccuauagucccagcuacuugagaagcugaggcaggagaauugcuugaacuuauaaguuugggaacaauuucagcauuauagcuggaucccauuucuaaaauaaauaaauacauaaaugaaaauuuaaaaaauuuugaaaauguauuggaaaaccauaauugaaucaaaauuuggggaaaugcaugcccaaauuuaagaagaugauguuaaaugaaagaaaaaauauguguggugaauauaggggaaauuauguggaauuuaguaucaugaauuucaguggaaaaaaggugauaaaaugaaaaaaaucuucaagauuuagcaauuucagaugaaacaacuuggcacuaagcuaaugcaaagagcuauuauuuuaaaaaggcucuuaaaguuuagaauuugucaccaacaccacuaguaacuagguggggggcgggguaauaccaagugaagagacaguaucuuuguggguauuaaaaaaguuauuucagggguuuaaucuauaaacuugaagaauugacaguauguugaaugacauguaagaaucucuucuuuaugucugcaaacaugcuuucuucaugacagucuguaguaagcagaauucuaagauggucuccaaaauuucuggccacuguugucaugcccuuguauaauccccugcccuuauguaugggcaggaccugugacuugcuucuaaccaauacaauguggcaaaaguaaugggaugucacucuggugaucaugucacaccgaaucauuuuagaaaaguuacaauguuuucuuuuuucuucaagaaauaaauaauuaguaguucugacuuuuuaauguuaaguaccaacaaccaggcuuacagaagcagcaaaaugugaaagcuuugcuacgugaaaacauauacuaccaaucagguaaacuugacaaauuauacucagguuuuuuacuagaagcugagaggaguuggaauugaacaugaccucagaaaacugcaauauucagauugguaaaguagaccuggauaguauaauugauuuggcaaaaagcacacaauagguuaaaaaaaaacaaacuaggaugcaaaauucucaacuuuaaagcucuuuuuaaauucaacauggugccucuaugaauauuuuauagcuauaccucauuacaauaaguaugcauauuggucauuuuauuugcauauaugcagaauauguguauacauuaucaugugguaaaaugauccauauauggaguaaguagaugauguaaauuacuuuauacagccaaaccacaucugucacucaccauuucugaauugacuauuccaagaacuuuuaaaacaaguuauggccuccaguggagccaacaaccuuauuuuuucacccuucuccuggcccaggccacaguaguggaaagaaagccaccaacaauaaacuggaaagaaacccagaccugguuugaccucuuacuuucugcguggcuuugcucaaauaauucuuccuuuagcccauuuuuuaaauauguaaaaugaagagaugaucuuuaaaguuccagcuuuaauuuucuaugacuuuguaguguuugagaauuugaaaugauacauuuggacagucuuaaauccaagagagauaugaagugaggacugaugagaaggugaugagggagcagaucuggacucaggaggagaaaaggaugaggaaguucagaguggguauggcugcugggccugcacagucuggguaacauguugggacuguggcuaaaaaaguccugugaucagucuggucaacauagugagauccugcugucccuacuaaaaaaaagaaaaaaaaaugauguuuuuuuuuuugauacggaguuucgcucuuguugcccaggcuggagugcaauggcgcaaucucggcucacugugaccucugccucccgggcucaagcgauuccccugccucagccucccaaguagcugggauuacaggcaccugccaccaugccuggcuaauuauuuauauuuuuaguagagacaggguuucaccauguuggccaggcuggucuugaacuccugaccucaggugauccaccuaccucagccucccaaagugcugggauuacagugugagacaccgcgccuggccaaaaauuuuuuuaaauagcuggaugugguggugcaugcuacuuuggaggcugaggugggaggacggcuugagcccaggagguugaggcugcagugagcugugguugcgccacugcacucuggcguggaugaccgagugaggcccugucucaaaaaacaaacaaacaaacaaacaaauaaauaaaugaaaaauccugugaucaucucugaccaaggagaagcaaauagcuauucccaccuuagagacaaagaaaccauccacauguagcugggcuuuuaauuucacuauuagcuguauaugaaauauucaauuacucaacauuuauugaaagauaccauguucugagauuuguguuaaguaucugucucauggaucuccuucaucagcauaaugcauuauuuaccuggguuuuuguuuuguuuuccuuuucauguuuugcuuuuguuucuucuuuuuuauuggccaaauugaaaagcagaaauuacacuaccauuguuuugauauuaacuuauuugauaacaauuaggaguaauauuucuuaagguuugucuuccaguuauauuuuuuaugacuugucucuuuugacuauuauuuguuuguuuauuugagacaggucucauucugucacccaggcuggagugcagugaugaagucacagcucacugcagccucuaccucccagguucaagcaauucugccucagccucccaaguaacugggacuacaggugcaugccaccacacccggcuaauuuuuguauuuuuuguagagacagcaucugauccucaggcuggucuugaacuccggagcucaagcaauucacccaccuuggccucccaaagugcugugacuacaggagugagccacggugcuuggucuuuugccuauuuuucuauuggaguauuaguguucuuauuugauugcaauugcucuuuacacauagaaaaucauuugaguuuuccuaacaaggauuauuugccaaauguauuuguuuucugugucuguguaacaaaugagcauacacccagcaucuuaacauacauucaccaacucacaguuucuguaggucggaagucuggcacugccuaguuggauucucugcucagggucucauugagaugaugucaagguguuggcuggaaauccaguucuuuuccagggcucaggaucuucuuccaaguuuacugucguuggcagaguucauuucucauaauuauaagacugggcuuccuacuuuccugccagcucauggcccagaaccacucucagcaacuagaggccacccauagucucuggccacauggcugcuguaugcaauuuacaauauggguguuugcuuuuuucuaggccaggcagagcauaucuuuucagcuuccucuaugugauagcaggagaaaucacugugcauuuaaagaguuugccugauuaggucaggcccacccagcaucaucccccuuuuugucauaaauguaauguaauuaaagggugauaccauauccacagguuccaaccacacucauggaguggggauuauacaagggcaagugucauugagaucaucuuagaauucugccugauacaccaaaguuugugugucuuacugauuuuuuuuuccuaagaaccauaaccuguuauaccaauauugucugcuacauugauaauucacuauuuuuucucuuuauguauaucuucuuccuuuuuuguuccuuuucuaauuucucaaagauauuuguuagguucuuucaucccuucuuaaucauauuaguaauauuaagucauauuaaugacuacuuggucuucuuccacaaauuuugacauaaaaugcuuuuauuuuugaaauagcuauuuugguauuuuauuaugcuuuuauucaauauuuguuuaggaggcaauuucuuaauuuucaaaugguuggaauucuuucuaucaauuuauuauuaauuucaggcuuaacuacauugugacuggauaacccuauaugccagcuauuuuaaauuuauugagcuuuacuuugaacuccaguauaugguuacuuuuauagaaauauuccaugaacccuugaaaauaaaaauuuucuguaaauauguuuuuugagauaauauacagucauauuuacuuuugcuauuaauauuauccaaaaucuaaauguugucaucuauuuuuuaaaauauuuuaccauaggcuaaaaaaguuguauuaaaaccuucauaaccaguauauuugcaucaauauauucuuauaacgguugagauaaaagaugaagugguccaauucuuuauuugauugggauaauaacacuauuauuauuaaauacucaaaaagggaaggaaaagcuccucuucagauguguaggaaaaguccaccucuauguuagcacaugaaauacgaauucauauaaaauucuaaagaaauucaauaacggcaaaacuaaaauauucucaaauaaguauuuuuacagauuuaaaaaucaguaaggccaauuaauuuuuccuuuuuuguucuuagauugaaauuuaauuucauuuugaaauuugcuauucacuaauaaaguaauuuguucucacuguuuuagagauuaauggaauauuucucuuucuuucuuucuuuuuuuuuuuuuuuuuuuuuugagacugagucuugcucugucgcucaggcuggagugcaguggcgugaucucggcucacugcaagcuccgccucccagguucaugucauucuccugucucagccucccaaguagcugggacuacaggugcccaccacugcacccggcuaauuuuuuguauuuuuaguagagaugggguuucaccguguuagccaggguggucucgaucuccugaccucgugauucgcccgccucggccucccggaauauuucuuaaaaucuauuuuaauguuuauuaaaccaugaaucaaccuuaaauuuuaccaauuucuaaauaggcuaguuuauuuaagaauauguauauuuucacacaugaaucuuaauagcuaaauuauacacuuauacacugacuuguaucauccauguauuuuuggcaggcugacuuaauaugugagcugacagaaugcagagaccacguuguauaugaagcauccacuuugccuuguacaccagggcauucaauaaccacuuaauaacuacaacccugaugguaagagcaguuuuccuccgcaguggauuuaugcaaauuucuuguuuuuuaacaaugcucuuuacuauagcaaaugauuuugaccuugaggguaaggcaaaacaaagcaaggcaaagaaaacuuucuucaauauucucugagaguaagugauuaaaugcuuuuuuucuuguucucugacuugauccuacaauguuuauauuuuuauuuuuaaacuugguuuguuauaaggagcuuauuuauagaguuuaguaggaguucaaauuauaauaaguaauauaaauaaaucuggaauuuaagggucaaaagcauacuuaauauguggucaugcgaugucuauauauuuguauauguauauauguguguacauauauauuuaauauauauauuuaacauacacauguauauauuuaacauauaaagaauauuauccaaaguacuuauuuuuaaagcuggacagguacuauuuuaaugcuggguacuuuacuauugugacacauauaucuccuaagucaugcuaaaaugagguucucuacaaccucagaaaugcuaguauuaauauuucauuguguacauugugcacuaguaaauauuucuauuguacacuaugcauauuaaaaauuaaaaugaccccuauuaaagacucucaacaaaggaaaauauaauaucaauggaaaagacacuguaaugagacucaacauuuccacagggcagcuagaaaacucaaauauuaacucauuaauucccacauuauucccaguugauuucuucaucaagcuguauguugaaaggacaaucuucagugauuauucauauuuacagaaugucaguuguuucuauucuuuagucaaacacuugcccaguauaaaagugaacguggaggaauacggcucuaauauacuacucugaauuuugcuuucgauaggucacacauaaacuucuguaucaauaauuaaauauaagggaacaaaagcaacauauuucagacauauugagucaauagaaaaucaugguaauacaaaaaaauuggaaagaaaacaaaaaaauucugaaaaauugcauuuauaauccccaagcuagaaaccaaaaugcaaaucaaaugaguaauuuucauuguuaaauucauuuugccaaauugagcacagagcuucuauaauguuauuuugacauugauuuuuaauguuaaauuauaacauacuuaauaagugucuacugggcaaauaaacuguauaucuauauaaugaaagaguugaaaguacuacuguucagaggaucagagaaacuugaguuugaaucacaaucacugguuuuauggacuuuaaccaauuauucugaccuccuuaggcuuuagguuucuaauuuguaaaaugguucuuacuucacauccuuguuauaaggacugaacaagauaacacaugaauaacguuuggcguaugcuuauuugauaaaugguaacaauuuccaucacaguauuguauuguuuguaauagguguaauuauugauauuugaacuuuuucacuaccaaaaaugugccaggcaucaaaacuaggacuugaaaaauaaaauagugaacauaauagacuuaguaucugcccucgucgguucacaaucagauggaggauacagagaagcaauugccacacacucuaauaggaguaguauagaguauauugagaacaccaccuagcucaaucuaggaaggacaggguagaauaaagugacauuugggacaagaaggauguggugggugaggaugagucaggugaagcaggauagaguaagagaguauuccugucagagagaaaagguauaacgaugagaacugauaaagcauagggaauuacauugaaugaaagauuaguauagcuggguggggaggugugagguguacuauuccaugauacugaaggagucagcgguggucaguuuugcagggacuuguacccauguuaaguaguauagacuccauacugugagcaaugggcaacuccugaaagguuagggaggacagaacgguuacgggauuugcauuuuagaaagaccaccuauuguuuugucaagacuacacuagcgagaggagacccguuuggaggcuguagcaguaaaacuggaagaugauggaggucugacacuggguaaaggccuugggaaugcagagagguggacaaagauagguagcuuuggcagucccuagugaucaauuagaaguaguggagauaguacucuuggguuccauggauaguacucuucgcagagaguaguugccaucucuuagagacuaugugcuuagguuggagauugucguauguuccuuaacccauauaacguaagauaaaaguauuagauggaaaaauaucagcaaagcaacaaguagauuuaaaaugcauauauaucagugauauaauugggaaaaaauggaaaucuagaaguaacugcccaucaccuauuuauucauucauuuaauaaauauguuguaugugcuguggacuuaagggaagacaggguuaguguuuuuccuguucucaaagaccucauaagcuaaugauacaucauagaaguucuuccuaaugauuuggaagacucuuccagcagcuuuaaacucagaaggggaugcuccuuaagcacaacuaucacacucugggagacuaagugcucucuaaguagaauuagaccaccacaggucagugugggaugcagaagcagaucagccuaaagugcaggccaguaccagaggaacaggaccuuucaggacuaagcaggaggacucugaaacacuccagacuaugcuguuaaccuaugcccaaugugcagugauuggaaguuaacaccaaaucuauaguugacaccuguaccuaguucuucaacaaauaguauuauuuauuucagaacuaugccaaagaaaguacauuuucagacacuauuaagauuuaguguagcgguuaagagcgugacucuggagcagacuauggagcagacugccaggaccaaccacuuacuguuuguguaacuuuggcaaguuuuccuuuguucaaaauauguuuauuuuucucaucuuaaggcuggaauaacagugugucuuacggcauaaagacugaaugggacaauauaugcccuccaauaguacuuuguccauggugaacauuuaaacaauagcuguuauuaacauaaccugaauuacuaaggaccucacauuuuuacucauuauucuagagcucacucaucgcaaaaacaaauguauuucuuuuauaauuacuuuaguaaugugccuuuuuuguucccaaaagguacaacuuuaauaacucaauuuauuuaaaauuuuuauuuaaauggaauuaaguaguaauuuucuugacaucaccuuacacuuuugaacauuuuuaacuuccaaauagcuuuuagaucuucauaacauuucuauaagcaucauaggacagauaucucauuuaauaaauuaggaaacgggguaauauagauuuagcgauuugcucauaguagaguuaaggcuuauaagcucuuaaucuaguauccauauaaaucaaccaaaccucaaaaaauuauugggcaacuguuaugcacccagcauugugguaggugcuucggaggauagaaauguuauaaaauacuauccaaaaccaaaauaaauuuacuuucuauuuggggagauaagauuuuauauugucuuuugcauagucuuggcaguuuugcccagccuucaaagcucucucagaucuguccaagucaccauucuuuauuauuaauguucaauaaaaauucauguuucuagcuuaucauuauuccuacuauggcaugagucaagaaauuuucugagguuuuaaaaaacaauuccucaaauuacuugaauguacuuugaagguugaagucucuuaggacuuaaagagaggaugaaaugugacucaugcuauucccuuucuucuuuuggagaccaauaggaggaagguguagaaaaaacagcccuuaguuugcucuggaauggaggauaguuaggugugaguucaccacagauguaagaggcaaaauaaauaugagguuccaguucaccacaucucuucauaccagucuauucuugcuuccuggaaaccaagacucuuuaccuacaucucauccucagcuccugugauuuacgcccccggaauuccaaacuacuaauugucuccaaauacauccucuugcuuccugucuuuagguuucugcauguuuguauuuccugauuggaaugccccuuagaaaaguaauuuucuuaaauauuuuaaggagcuuaccauaucaagaauguaaucaaaacaauuuaaaaauaaacagaaaauauaaaauguaucaccauccccagauaaacuuauaaaacaauuuauuacagagggcaaaaggcaaacaacaaaaaaagacaaauaguggaguauguuaccaguaguaauucuuguaagaaaacuuacuggaacaguguggaaugcaacugguaacaauaauaaugaugauuuaccagauauucuauauuaauuaggcacugugcuaaguacuucacauuuauuaucucauuuaauacucugucccagaaaugcagucaguaacauuaugcacauuuuugagaugaggaaacugauuauuagauagguaaagucacacaguaagcggcuaaaaugaaauuauauaacccaguaucuggcuccagaguauaaccauuuaccaacuuuauaacuguggccucacaugucuaaaaacaaauauuuaguguaugaagaauaaacagugggcacuuguaauuuuaacacaaggcauuaauauaauuuuggagguauuauaaugaugcauuguagauaagucauuacuggaauucaggaauggaaacaauaacauguucaaaugaaacuagucuaauagaggccaugaaagguaacauuuuugcaucaguaacauaugucucaauaugaaaauucauacuuaaagguugaaagucauacacacacacacacacacacacacacacacacagagacagagagagaaaaucauuccuuauagcuuauuaguauacuccuuuaucuagucucccuggcauaugauaacugauaaauaaaugaaaauaggcaaaaagaauaaaggcuaaaacaaaaagaaccaaaaugaugagauuaauauacuacaggcagcauuccuaauguagaacaaagacucuucaucuauuggggcaucugcugucagcuuaauuccucuaaaagcagaauaucucauaauuuaugccuuacuuugaugaacagaauacaguauaagacugaugaagcaaugagggcaaacaauauuguguggguuuauuucugaccaagaagaaaggaauugugaaguaaaagugccaggaaauuugauacaaugugguaaucugugaaagaauauaaaaagaaagccagauucaaaaaugaauaaaagaaauugaaauguaucauuaggggauaaauagaaguuucaguauuuaauuacaaaauuucgucuggaugagauacaacugcauuucaacagcaauucauguggaaaagaugagagauuauuacuuucuuagaagggugguguaaagugacaagguaacauggcuaacaaaaacaaaaacaacaaaaucuaacucaagugaaucuugaaucuagagaaaaaauugguccaaaauaauuggaauuaaaaugacaaucucaaguaugcucuaaucagagaaaguauuuaugagagcccuucagaaugguuuuauuaagaagaguugaaugagcuggaaaaguuugaucugagugucuacuuuguaccaaacauguuuaaguaggucaccacauaaaaggagagacaugcaugcauauaaguagcuacccuaaaauaugauaguacuuuguaagacgcaugagucaagaagaugcauuauuuauuacuauacucuaugccuuauaucucugggaaccaaaaaagaaagcaaucuguucugccuaggguuaggaaggcuucauuaucacuaccuucaaaaagcugaaacagucuuucugaagcuuaagaacuccuggacuucagacacuaugcccaugaaccaagugguugcauucuaauuagacaaacaaaacauuaaaguucagcacagguggcaaaagcuucauuuaccaggacuucucccucugacaugaaaugugcucuaacguuauucuguucuauuucauuggccgggugcaguagcucacaccuguaaucccagcacuuugggaggcugaggugggcggaucacuauuucauuaaaauuaaaaaaaaaaacuggccuauuaaagggauuucucaagucuaacuaaacuaugacucacaauuugagaagcaccacauuaaauuaucucuaaaguuucuauuaccuuaacauuuaaaauuucaauuaaugcaauguuccaagauauaaaauaccacaaaguagaaagaaacagaacuaccucuagugcuucaguggauaguugcuuuauaaaaagguuaguguuucuuuuagccuugaucaauauaaaaaaacaauaagaguaagaaucaugucaaauuuuuacagaaaauguauaucuuauggauggucuuuguaaaauagucuuuuuccuuuuuaauauaacagauagcauaugguagccauuaguccucaucaaaugcuaaauguaggucuaaagauucaagacaaaggaagcuagacuaggcuauuacuaaauuuauuuuaacagaaguucagaaacaauuuuauaaagacaacaauuuuucaaaaaauuagccuucaucugauuccuuaggaaaacucaaauaaacaaagucugaacugacauaauauccaaauuaaaauuucuguaaaaaaguccacaauauuugauaaaaacagucuauuuuuuuuuuguccugaaucuauuuccauagacauggaaaugugacaggaucuaucuacuauuacaucucugcacuauauuucuuucccuucucucaucaaacaaaucugaauuaacuaagcagcucuaaugcuagggucagggcagcugcuuccagcuccaauauuagcccccuacuccuaaaaguggaggcugaccuagauuauucagagacucauuauaaauacuugaagcaucuuuuaagggauauagucacuaaaucaaaagaaugucacauaccugugguaucuuccauggacaacuaucaaaaugcaauggacaugaugauaucuaauagaauuguaucucuaauaaaaugucuuuaauguauucaauccuuuaaaauauuuagacuauacagccuaaaagaugggcacccugcuguuuuugagauuuccaaacacuaaaugggaaguaaaggugcuuuguccuagacuccuuguuaauuaucuuauauauccauuagacuuuuaacuuaauauuucaaaguagguugcuauggauuaaaguuuugucuccacaaaauucauaugcugaagcucuaaccuucaauaugacuguauuuggggauagggccuguaagguggugauaaagguuaaaugaggucauacagguuggacuuuauucugauagggcuggugcacuuauaagaagaagaauagacaccagaguucucucucuuuccauguacaugcauugaggacaggccaugugaggacgcagcaaggagguggcugucugcaacccaaggagugagcccucacuagacauugaugcugcugguaucuugaucuuggacuuuccaguuucuggacuaugagaaaauaaauuuugguuguuuaagccacccaguuaugguauaguguuauggcaguccaaacaggcuaaugcauagggcaguguaauuuuaguugaaggagcuacaagaauauuucuuguuguuaaguucucuucaauguacaugagccaaugugaugcaaaaaacaauaaacagaacuuguaaacaagggcucuaaguucaacucucggcacuccccucacuagcuaugugaccuaaugcucccuaagcuaauuuucuuaucugaaaaguuaacauaauaacacauuucuuuccagguuauuguaaggauuaaaucugaugauguuugucuauuuguuagaucguucauucauucaucuaacaaauauccauuacuaaggaugagaaaacucacacguauacuauauuacccuuuaauuuaucagucauuuccgaguuaaaucuuuuguuccucagugaaauaaaauuuuacaugaugucaaaaaaaucuauauggaaaauauauaauaauaaauacaggcaauauaaugcauguauuguaaauguuccucaauuuacaaugagguuaguuccugauaaacucauugugaguugaaaauauuguacaucaaaacuuacuuaauacaccuaacuaccaaacuuuauagcuuacccuagucuacuuuaaacaugcucaggaaauguagauuagccuacaguugggcaaaaucaucuaaaggaaagcaugauuuauaauaaacuguuggauaacucagguaauuuccugaauacaguacacuguacgguaaauauugguuguuuauccuuguaaucacgugguugacugggagcugcagcuugcugccccugcccagcaugagaguauauuguaccacaaauugcuagccugggaaaagaucaaaauucaaaauuuagagcaugguuucuagugaauggcuauugcuuuuguauuaucauaaaguaaaaaaaaaaaaaaaucuuaagucaaaacaucauuaagcugaggaucaucuguauguguguauauguauauauguauauguauucauaccuucccacaccuauagaaucuuaccucuuugcuuucuuccagauccgauucacuacuaaagucuuccguguuuaaauuuucaaagucagauucuccuacagcaauugguacagucacaguaagacugggguuguuuaugaaugacauguaaucacuuucaucaauaauguauuuuucaacacugcugccaguuccuauaccacuuguaguuccauuuacaucuuuaagauagucaagaucuuucccaauuucugcuguaugauuggacauacaacugucuuucuuguuguuuagaucaucaagugguuuaauuucaucuaaaaucuuuuguuuccuaaugaaggacuguugaauaaauucauauauuuuucuuuucacauaagcuacuccuuugugcauccuauccacagcaauuuggagauuauucauuucauuaucaucaucaguggcugcaagguugucugcacuaaaugagcucagaagcaaggccagaaagagauucaggaccuuaaaaacaacaaaaacaugauuauaauuuuacaccaauguagggaagagcagauuacaaucacuuauucuuucuuuuaaguguggaaaaaacucuaaguucuaaaacuugaugagaaggaaacaccacagcauagugauuagaagaugggugaucugaauuugugacuggcucaauagcacauccuuggacaaagacaugauuucuguugcucucaaguucucccauucguaaagugaaauugaaugagcuaaucuaagguuuuguuaacucuaaaauuguaugaguagaagaaaacagauuuauauguguacaauacgagaauucuuaaaaaucacuaauguuuccaaguaugcauuuaaaugcauucuauaauuuuucaauaaacaaagauauuaaauuggaugucaauugaaaaauaaccauuacaacucagaaugaagauuaggagcuuaacauaggcugacacuuguuuucuuaaucuauuauauuucucauacuucauuguugacuaaguagagcuguuuaugaauaaucucucauauuuccaugagacuggcacaugaauguacauaccuuuagaauauuuuauguauuacuauacuauaaacaguaacacuccaaauuuaagagagauaaagauugaucaguuacuccauuaugguaaucucaggcaucauuagccauucgagaacugaugaacucagguuggcuagugcaucugccauaugacauagagugauugaauaucauaugcugcaauggggcaaagaaauggcacaagcauuaugaacucuuaaagacaccacuuuuuaguccuagucuggaugguaauuuugcacuuucucucuacuuuuuuuagacuucucucuuccuuggcucugaauuuauaaaauggucccagcacauccuuuuaggcucaucucaauaugauacucuauuguaauucacauaaaaaaugugauaaagugacugacaaaauagaauuugguauaaaaaaugcaggggcacugcuauauugcuguguuguuaaagugauaauauauccaagguaauggacuuuuaaaccaauaaucauaguuuguuuuucuuuuugacaaaacagucaccauuaaauuauacucuuuuuuuuuauuauacuuuaaguuuuaggguacaugugcacaaugugcagguuaguuacauauguauacaugugccaugcugguguauuuccaaaaugcauaucuuaaguggguacauaccacuagguuuccaaucaccaugaccaucaugaagacaguaaggcacauggcuugaccagcaaccuccauacagucccacauggucucuauccacuccccacacagcacgcggaacacaaucaggaaggaguggaagaagucauucaugugccagcgugggaguugacaaucacuggcgaucuugcagacacaaucuuuguagcuuuuaccaaagagcugcaugccgaccacggcaaaaaugaagacgaugauggccaagacgaggguuaaauuucccagagcccccacggaauugccgaugaucuuuauuagcauauuuaacguuggccaagauuuugccaacuugaaaacucgcagcuggaaaaugaaagauuaauauauauuuguaugauucuuaaaagcauuauauauauugagcuuuaccuagaaauggucauuagaauucaauaucuuacaauaucugaucugcccuaaccgucucaggcucauggcuaauuuuuggacucccuaggaaaagcuggauuuuccauauuuuaaccauguagaucauuuucucugauggugaauuauuuuucuuuccuuuucuuuuuuuuuuucuuuugucacccaggcgggagugcagaggagugaucucggcucacugcaaccucugccucccagguuaaagugauccuccugccccagccucccaaguagcugggacuacaggcacgugccaccacaccugguuaaauauauauauaguagagacggaguuucaccauguuggccaggcuggucacgaacuccugaccucaagugauccaacugccucagucucccaaagugcuaggauuacaggcaugagccaccaagccaggccucuuauagugaauuuuuaaugaguacuuggaauccaacuguucuuaauuuguuuuauaaaggugguucuaaggccggauauuauaauauuaacaucugaaucugaaauaucucugcugaaagauauuaauuugccaguagugugcaaaguaacaucauacugagcccugauauaaguaaaguguucauuauucauuaaugcuccuuagggguauucauguaguuacauccaccugcauugaaaaacuuggaauauuuccuauaauucuacaauuauuuuccugacuuguaaggauauaugugugaauuaaugggcaugcuuaguaauccuacagacuuucucuccuuugacuuucgcaagaugcauauuuuccagagacagaauuagaaaaaguuucugcaugcacaucuuacaucugauuuucauccacugcuacaaagggcuauauauauuuucaaguuacuauuaaaaggugaugcauuuucauuaaaaauauuuucuuaggucuagaaauauuaacuguaguagucucuagaagcaauacuuagugaaaauagcaacugaguaauacguuaacuuuuacguaacuauguucuuugaaauaaagguuuucauaaauaauugagaauuuuuuuccauguaggaaaaguuuuugacaaugcaaauguuacagaaaaacuuacaaugcuaaugguuguguggcaaaaaaacuaugacauugcuaugcaagaacccugauuguuagaaagguuuuugaauuuggugcuuuuuuuuuuuuuuuuuaccaaucgaaaugaacggagaacagauaauccuuccacauuggcgaguccaaguucuaccaggcuaagcgucacaauaaaaccgucaaagauauuccagccuucuuggaaauaauaguaaggauccauggcaauaauuuucagaaacauuucugcuguaaagaucccagugaaaaccuaagaucaaaacaaaauuaaucuaauuccaccagauaauaacauacaugacauaagauuugcucuuagaacauaaugcuuaugcuauuuucccacaaugauucuauuacuaacuuaaauuuguauggcaauuuguaguugaugaaagacuuucauauacauuauuuaauuuuauccuuguggaaacgcgaaguagauaauauacaauuauuacuuuacagauaaggaaacugaggucuucagaugggugaaauggcuugcuugauaucauacagcaagaaaauggcaaaacuaggauuugaguacaagucaucuuuuuuuuuuuuuuuuuuuuuuuuuuuuuuuugagacggagugucagucugucgcccaggcuggaguguaguggugccaucuuggcucacugcaagcuccuggguucacgccauucuccugccucagccucccgaguagcugggacuacaggcgcccgccaccacgcccgccuaauuuuuuguauuuuuaguagagacgggguuucaccauguuaggcaggauggucucgaucuccugaccucgugauccguccgccucggccucccaaagugcugggauuacaggcgugagccacugcgcccagcccaagucaucuauuuuuaacagugcucuuuccauuauaccaaacuaccuuuuuguccagacuuuauauaccacaaguacugacaacauuuugcccaugagcacuuuuauuuaucuauaagcuuauuccuauuucccucaaucagaguuauacauucuuaucuauuauacuaggugcauuacuauugucauucuuuguuaugcacaugaaaaaaauaaauuuacuucuguaguauaaauaguagaacuucaaaaauauaacuaauaaaaugcagguuguuaugcaugaugcuuuuguuuucuaccaucaaaaauccuaaacuucaaaccaaauauuacaggaaaugcauaaauuacuuuagauagcucuuuccuucagcaaauaaaagcuaguauuccuaaguugaguugacuggcaaacacuuuaauaauuuauguuuuugaagcacaaaaaggaaaaauuaaguggcaaucuucaccaaaaaugaccuuuguaaucauauaacacacaaaauguacuggaaguuuucaauaguucaugguuuugauauagaauagauggauaaacaauacauguacuacuuagauccuggaagaggaaaagcuggagacauuuuugaguuguuaaauuauuucuugcagugaugaugacuaagaaggauaaaagagauccacaauuuuauuuuaaucuucuacaguaagggaaauuguaauaauaucucaaaaaguauguucuuaaucuaugagcuacuucuggauccugaaaaauuauaaauauugcuguugacuuuucaaguagugcuguaggccuaugccuuucucaguuuuugugagcacauuaagggugauuauuuuuggcaaaaaaguagaguauagccagcuaaauauaauugcgauuuugcaggggccaggaagcaugaaggaugguugaaagacugcuauacacaauuaaauguaaacaguuuuucaagcagaaaauuugaagacuaaacacauuuaccuuccaauaugcuuaccaaguuuccuacuguaagcacauuauugaaaugguccgucauuggauagugcuccauggccaugaaaagaguauuuaagacaauacagauggugauggccaggucaacaaauggguccaucacaaccagguugacaacauguuucacuuuuaaccaauauggagaacagucccagauuaagaauauguuggaaaauuuauaccaacagggugggcauuucugccuggauucuucaaguucuagauuaagaaaaaaaaaaaaaagaaccaccaaaagguauacuuuauacacacacauuuauuucauauccacuaaacuuauuuucaguaaucaacacauuuuuguuacagagacaaccuuuuuuguacuuguuaaaaaaauuacaguuuacucuaaaccucccaaggauauuucaucagacacacacauagagcccagguaacaauggguaguuuuuugucuuaugcacugacauuguggcucagcacuuggccucaaguuaaaugaguggucuuucaugugacgucucaaugggaacaugguuuagggugguguagauauugugugugcaacccuaugugaaugacucuacauugucaaccucagacuaugagagcuagaauagggauugaugugacccaagaaucaucuuuuuagcuuguuuuuauuuugugaaaaugaccugcucuuccucuacaaucuugagaguacuuaggaugaggcugaaaagggcuguacugcugaagucuuaaacuaauggaacaaaaagagggucacuaugacuaaugagauuagaaaccccuaacagaaaugcuuuguucugcauuuucaaagaguugcuacacaguuaggaaaacauucuuagucccaauaucacucauuuuaaaauaaauuguuaaggcuucuagaauaucugaguagauauaagaaauaacagcucuugaauuagacugucuuuucauuagaaugcacuauucccaacucacaaauauauuuguuugaaaugagacaauauaaguuuggugaaaauaauugaaacgaaaauagaauuuguuaccaaccuucuacuguauuuguuagaaugcuggcuauacucauugcucguugccuuugggaaggaucuucuagaaaguccauggaaacguggaaagaacuugaccuucucuuucucauuucaguuucagugguuguucccuguaaaaaaaaaugcuaaugcauuaaacaauuaauuugagcaauaugacaagcaaacaaccaaauggugacacagugaauuucaugaaacacaugcaucaugcacuuucauauucaauuggugauggcagauauuucugacuuauuguaucauuagccuggaauguucaaacuguuaaccauuuagucauacagcaaaaaccaagauguuaacuuccugauuucauaauuuuauaaaauacaaaauaauuuuaauauaguugauaaaacucuuaagagauauauuuaacaguuauuacccuuauuucugaacuaauaguaaaagccuaguaacuuaaaaguccuacaagugaucaaggcacuugauuuuugagaagguagcuauuuaauuuuaaggaaguauaaaugauugcaacacacuuagcugccaucuuauuuucuggacacaagauguagauggucauugacaacacaaacucuauguuaaaaagaacacacacaugcugcauggacaacaguuucauccaggguaccaaagcaauaagucaucuaauucugacuuagucaugccuccucaugcugauauauuuccaagugaguaaacagucuaagaagaggcagcaucuguuuagaaauuccucaucugaguauacauccacaaacacauaacauaccuuuguacacagacaauuauuuuaucugucuguauuaauaauguauuugugucucuucauuuaauuuugagaagaccuauaucagcauuuuuuaguaagaaaaauaugaguacuaggaguauuaagguaacaaugaagcuaucuacuuaagcaguguuuuugaaaaucuaaacuaaagcagagaucuugaagaauccauuggaaagauuuauuacauacccuugacacuuaaacauagaaucauucauuuacuuucauaccagagccuuggagaauguccugcuaucuaaauucaguguggguauauagcaaauccuccaacuggaggcaguaauuauugugucuaaucaauccuuagcacuuuuaauaaguaaaugcauucagguuugugcaggagacugcuaagguuuuaaguuuuaguugguuagucuauuaaagauauuacaagaugcaggugcauucacagcgugaccaaccaggaaucauucucaagguugccguucuguagaaacacuggcuggugcagcaauagugagccagccaugccugaacuauuuaaaacuuccuuacauugucaucaguagcuggcuuaucuauuaucaccucuggcagaagcuguccaacaggcgauguaggaacugaagguccaccaaccaaggaaaccacaccauugcaauccacagugcugugcaucuucccauucgcuggaaacacugccagcauccgggaugaccuacuggucugacucagguugcuguugcgucucucuccgugucgucggggcacaaacaaggaaucucuacggcucucguuauccucaaaggugcugugcucaucaucugcgaagucguucucagaucccacauccuuugcucgcccucuaaagcugaaaaggcuuguucugcuauuucgccuuggugaaaauagggagccacggaugcucaacaaagacuagaaguuugaaagagcaaacaaauaaagucauauuaauauggacauuugaaugugauuucauuuugcaagauuauguagaaggagauuucagcauucauaacagaauaugguucauuccuuuugauuaucauucucauuuuaugugcauucacauuaaauuaaauuaccuugauaaaagaaaguuucuagcccuugggauuaaagaaugaggagauagauugcaaccuuaacauauugaaacacacacacacacacauacacacacacccugaacgaccauuucucaaguucaaagggaaacauccuuagaauauggcaauggacgugguaaacauucagugaacacuggcaccaugaccuuaacaaggccaccuugguuuuuauggaucuugucuuucaaaaacuuucaacacuccucacaauuuacuuuaguccaccuuucuaaaaucacuuuaauuauuauuucuuuuucaccuauaaggcauuguauuguuggaacuugaaguucauacuucugaaauucagagucaugugccuuuugaucaaguguaccaugacuaauauuuucagaagcaugcauggugacuuauaaagaaguuagggggaaaaaaaacauaaaaucauaaaauaaccuaaggacauuccugaucgacuauccggaguuccacauuuuuuuuuuucuuaaaagugcugaggaucaaaaagauuaaaugucauuaguuauagacaaauaucagcagacaguaucagaaugacaguccaguucuccugacugucaacuugguguuaucuuaacuacaccgagcuguagacuuacauaucuguggaguaaaguuuuugcauaacuaugugaagaagggauggguuuaaauauaacacaacagugguugauucaguugauaaaaauuccugaguccauuuucuaauucucccccucucucccauguuuuaauuuucaaccaugcaucaguaaacucagcagugccauaccugguguggggaggaguaccucuuuucauaugucaaucgguucccuucaauggagaagcgaaaaccuuuccuccugaugcuguccucagauucagauuuuuggaauucauccucaucuuucucuuccccaccagacugcucuuucuguuuucuuuucuuccuccgauuucuucuuuccuuagcacucuuggaacucaacuuagaggcuucagaugagcugucugagagccugccugcugcacugggcucucuggaauguucugaggcaguugccguugcugccugcuauauugaagagaaaugauuuuaacauagcaccugaagagacuguaucuuucuuugaaagggcugaaguauuugcauggcuuuuaaaaaauauauugaacugacugaagaucaucucacagagaagauucucugcaaguauaagaggagauuuuuuuuuucuuucuaccuaaugaaggcuuuuggagauaauuuaguuugcuccaugguaacauuuauuaugucucuguuaaugcuccacagaccacguauucaaaaauauccaacauguaucaacaagaaaauaaauucauuacuuuuugggauuugauuuacuuuaaaaauugguauuuaauuaguguuguuuucuuuucuccgaaaaagaaacucgaguauggaagaaaagcugaugaguuuaaggcaggggaaugggauaaggaccugagguccuuucucuaguuauugaaauuggauuguccaauacccucaaaauauuauuaauccuauuuauggacaguuauaaaaucccuuucucacccauccacaauauccagaagaauggggaagggagaaucaauaguuucugcugagcaagauaagacauccaguucuccaaaaacuguccccaccaucuucaaaucaguacugguucuuaaggggcacaugggcauggaauaaaacaaugcuuuuugauuauagcuuguacugguacuaaguugacacuuuuuuauuauuaucauuguucccaggguaaccucgauaaauuaauuacucuugcauauaaauuaauauuucugaaacaacuuucuucuuuaguaaagacaauaaguuuguaugcuaaacagaaagaugagagagauaggagaggcauuuuaugauuuaucacacugugaggacuaacacuucacuauaaaaacaaguaauccuuuuuagauggucaaucuguguaagauugguaacauucauaugucuauuggaugcugcuguaucagagaucauuauauuauuugaucacuuccuuauaaagguaauaaagcaaccacguuaaaagccaacauauuuuuaguuaaagaaaaaaggagacuauguuuaagaacuagaggagcaacucuucauaugauaaccaauaauuucuuguucuaagaaaagaugauuuccuccuaaugccagucuacucauugaauaaaagucucucacuugaaaauaccccaaaauaacauuuucccuuuacuuugagaaucuuaagaugauuaaaauagcaugagagaguucuauugugguuauuauuauacacaucucaaauaaaauaauuaaacuaaauaaaaguaaguggaucaucaaaauauagaaaucauuauuaauuccucauacaaccaccugcucuuagguacucacuuucucuucaauauuacguaacaaucagaacgauaaaaggucagugccaugagacagggcagcuuuaccugagcugccuccuguugcuuuuuaagcuguucaaucaucugcugaaauucggccucuuucuguucugcuucuuccaagguggccugauucuguuccucguaggccauggccaccacagccaggaucaaauuuauuagguagaaugagcccaagaaaaugaccaauacaaaaaauaucauguacguuuucccagcagcacguaaugucugcaaacaaaaauaucagaauuauuucucaauauuauuucacuaagugguggcuucaacuuucaauuuacucaugugucuagcaaaacucagauauaaauaguaauuauguuggucauagcacccuguacuuuuuuuuuauuguuucuuuaacuucagcuucuuccuucucuucuagcuuaugcauucacacuaugauuucuauggcagaauuuuuguauucaccaagaaugaaacagucaauaaaaugccauggaguccuccauuaacgaccugagccuuuaggaaagucaaggaacagaccaaaguuaucuuucuauaucugcuuuuucauuuucauuacuucccaccugagggauaauauuugaggggguagauagggcugaagggagaaugugccuucuguuuaggacaaucugugucugagaaggguagggaacagguuuugagccaagaagaaaugggagagaauugcaauccuuggcaucacucugcucaguauguguuauaaucaauaggauagaggaacucaagucucguuucaaguucugcucuuucuacuauauuaucauccgguuuuaauuucauaacucaauugguuuucuuguauacuuuuacuuaaauggagaguguggcucuuuaguucucaccaguugauaaagauuuucccagaaguccugagucauuagucgaaacaaggacaaaaaagcccaacugaagguaucaaagcuuguguagccauaauugggauuucuaccagcuuucacacacauauaucccucuggacauuggcugcaagugggguaaaagaaaguauuacaagucguucugcugccuuuuuacucugauacuaugcuaugauauugccuagucagaaagauuugguauuucaaaauaaaaguuugacaaauaaguaacuaaucuauuucccaacuuuugacugcauauagucuuauuagcuacuuggugucaucauuaaaauauggugcagcauuucuaauaauauuuuacaaaauaauuuuuguugauaauuugcauuuucaacaccuccauuucauuuuuacuacuauggagucuccagaguuuauagcucaauauacuuaucuaaaagaacaacauuguuauuauuauauacuccuaaaaaaguaggaacaggauuacuccucuuuuuguauguuugcuguuauauacaguagguguuuaauagauauuuuucucuuuuuuuauacuuuuauuugaaguucagggguacguacauguacagguuuguuauauagguaaaugugugucaugaggguuuguuguguagauuauuucaucacugagguauuaagccuaguacccacuaguuauuuuuccugauccucucccucuucccaccuugcacacucugguaggcccuaguguguguuguucccuauauguguccauguguucucaucauuuagcucccacuuauaagugaggacaugcgguacuuaguuuucuguuccugcaauaguuugcuaaggauaauagccuccaguucuauccauaucccugcaaaggacaugaucuaguuauuuuuuauggcugcauaguaucccaugauguauauguaccacauuuucuuuauccagccuaucauugauggacauuuagguugauuccaugucuuugcuauugugaauagugcugcaaugaacauacgugugcaugugucuaaaaguauuacuucuuguuuuagaaaacauaaaucuuaccuaauauuuacauaaucucauacuuuaucaaaaaccuuacauauagcaaauuaaugucaauaaaauuaguuggcuguuaucuucaguuucuauaaaaagagagaaaagauacacauauguauguguacauacaaauauacacagauacacacaaauuauugacuuacccugcaucagagcuauuuccacauaguagugcaucuaaaaaacccuccaggaaauaaugauauccuguuugaaaaaagaaagucguaugaugaacauuugcauuguuaaaaacacucaaaugagaacaggaaggucagguucuacuuuuaaguuuauugaguaauuuuaaauauauuauucauucaaaggcacaaguauuugucucuucucccucuaaauucuagauauucuauuagauacuuuacagugcaaaguauuucuucauuaugaagaaaugacauuagauuagauacagugcaaagauacuuuagacacuuuacagugcaaaguauuucuucauuaugaauguaaaguuagugauaaugacagguacuaacauaaucuuucaaaaagguauuagcauuuguucaccauucucacgaaaaaaauucauucaguaaaaauagacaggaaugacaggaauuucuuuguuuuugcaaaacagccacauauuucaaaauaaaagaauaguauauuuucugguccucucgccuauauuuuuaacacuauacauuuuaauaauuaaguauaacauauucucacauuuugcagaauauaggcaacuuauaguaaaauaugcauaaaucauaucaacaacugaaaugaaagcaauuuuaaaaagucuuaaauacuaaagcuaaaauaaugacuauaggugaacacuacauuaucucaaagauuccuguuucuugcaaacuccuuggcuucuugcaauguccaguucuucuauaacuuuuuccuugguauuuucaacuuucuuucuacuaaauauugacauaauuaagaacuccccucacugugcuaccaguaaccuguauauacuugaauuauucuuaggaugacacuacuauauuguaauuauuuauuuacaaauauuccuccuagaaagucccaaucauuaauuauuucuauauuaguguuuguuugagaccggguagccuuucuguaaaguuuauugaaugaauaaguaaauaaaagacaaaaagagaaaaacauggaauuaaacaaucaauguuggauuuuguaagaagauauauuuucuagaugcuaaguuuucugaggaauuuauuccauacauaguucuguacaggacacagaagcacauaaggaaaaauaucauuuuuauuucuaauauucugacuuccuugaaccuagacaggaaaguugacauaguauuuccuaacuuucaauuaaaauuaaacaaagagaaaggacuauaauaguuucuggaugaauuuuugauaucucauauuuauaaaugaaguuuugcccauuaaauucaaugaucuaaccuuaaugaucagccuuaaccugaggaaaauauaauuuuucaguuauaauaguuaccuuuaauuuuaauaaauuuaauuuucuauuauuuucagaaaugaaccauuuuauuuauauuugcauuugguuuaaaauaagaaccauagauguuuagagcugaaaaugaccucagauauuauuuuacuucgaguauuggaaaaaugcaguccaauaaauuuucccuagagagaauaaacccuaaauaacccucauagucaguauuuugaacuuagauaaaacaaacaaacaacagauuucagggagcuggugauugaaguggaccuacuggcauucguaucaccagcuacuaaggaggcugagaugggaagaugccaccacacccaacucauuaaaaaaaguauauauauauauauauauauauauguguguauauauuuuuuuuuuguagagaaggggucucacuauguugcccacacuggucucaaacuccuggccucaagugauccuccagccucagccucccaaagugcuaggauuauaggugugagccacugcacccaacuaacauuuucuauuacugucuccugaagcuuuauuaacuguaauuuucuucuuuuuaauguaauacuacuuuuuaaauauaagaauaagauuuacuuuuagguaucacuuuauuuccuuaagguaauaaaauaaucuauuaaacuauaacacucugaagccaugcauuaccuccauuauuuuccccaguguacuauacaguuucugauacauuaaagacauuguguaauuaauguauaaugaguuacauuugcauaguauuguagaauucgcaaagggcauucacauauuuuaucuccuuucauuauaucaaucaccacaggaagaauguauagcaaccaaggauccuaggaaaauucuuucuagcugaauucuucagccuuccaaaugaugauaaaauagaaaguggcauuuaggagucaaaacuagaguaguuaugaacaaaguuguuaaauguauguggaagccauugauaaggugauuaacaaaauucuucuuuuaguuccagaaauauaaauaaucuauuauuuaaaauccaggggguagaaauaccaaauaaaauauaauuuuaaauauuguuaaauaguuugauuagguaauuuucuaaaagaucacgucuuguuauguaaucauuuaaaaauauuuuucauuccuagauggaaggcacauuagcaaugaaaagaccaaauauacaugauaguaauucuuuuuuagaggguguuuuauuuauuucauuaguuuuaaauuuuaaauuuuaauuuuuguggguacaugguagguguuucuauauaugggguacaugagauguuuugauacaggccugcaaugugugcuaaucacaucauguaaaaugggauauccagccccucaaguauuuauccuuuguguuacaaacaauccaauucuacuuuuuaaggaaauguacauaacaauaauucuuacuugaaucuugaauauaugacuuccagucaaacucaaagacaguuucauuuauaaguguaccauuauaauucacaguuauauucuuuucuauacuauguuccuccaaggaagcauuggugggaggccauuguauacauuuauuccucagguugcccaugaacagcugcagcccaauuagagcaaauacgcucagacagaacacagucaggaucauuacaucugagagcuucuucacagacuggaucagggcucccacaaugguuuucaggccugaaagaaagaagucuauuacuaugaagacuuaacacgugugaaauaauaaaagcuucacacaauuuucuugaaaacauagauuucauucauaaauccaagaauguuugcaacgcuaguggagaagcaacacuucauugaaggggaagaacuuaugaagauaaacuccagaaauguaaugauuuaaacaaugaaaugaagauucauaucccauuaugucgagauagaguaauggaagguucauguucuucauggagccuauauuaaggaaagggccuugucuuuuuccuuuuugcuacugaaacuugucucauauuuucauuagggucagaggucaguuuuauaacaaaauaccugaauaaauauuuuaaaauuccuauuuauaaguaggaaagauuuugcuguacaaccgaaaauggucugcaguauaauugugccuuaagauaauaaauccuccaugcagacucacacuauucuuuauugucuuauucccuucucuuuuguuagcaaaaaacuuagaagauuugcauuguauacacauagucauuaaugacucuaaugaauaagaaauuacagauugguacauuuaaaagggagcaaauucucgauaaaacuaacauggugaaaaaaaaaaaaacccaugauauuuguaagugcaggucaccuugaccucaaauuacaguaucucacauaagacauuguuaaacuccaaggcugauaaagcuuaugucuaaacaauaagaaucauuuucuuugaaacaccuagucuuaugauuccugauuuucuguaaaacugaaugucaagcagagaaggaugcugaaucacaugauggguccgucucauuaucuaaccuugcucucaccuggaaugacugaaaucgucuucaaugcucggagaacucugaauguucucaaugccgagacauugcccagguccacaaacucugugacguaccuguaauagggaguucacacacaaacacaaaaacaggacacaaagaaaaagcuguagguacaaagagccuauccuuuacucuaaucacuucuuaccuggaauuaccgaaauaguuuucaaagcucucaagacucugaaagugcgaagagcugaaaaauugccuagguuuacaaauucuguuacaaaccuguagaauuaaaucagaauuauucaagauuuuagcaggauuuauauuacuugcaugggucuuuuauaaagaccuucuuggugauuuuaaaugauaaauauuauaagugguaaaucaggaauuagauuccaucauuaaucuuuguucacauaauuuaaggccauuagcuaaauguaaacuucauaaaguagacacccuuguugucacucuggaaagcaaugcaaccaacaucauguguaacuuguaaaaagaaaguaaaucuuggcuaugguuuaggguuuuaguuagaaaaaaauauaugaaaucacccaacagaaauuuaggcaugaaaaggcaguuugccuuacugcuuuuauauaugagauaagauuuuccuaguguaacuuuuaaauaaaaguuaagcaaauuaagaacaauacuugaugaggguccaaugcugcgccuauuguuacugccauuuuguucuuaagaaauagaaguccuguaggccuucuuuugagcugugaccagagagccuagcaaagaauuggcucauccugaucagauaggaaauuaagaccagacauucggaguccugaguguaucagugccaccucuccugcuccuauccacuacaucacaacuguuagaggccaaaaaaucagcuccugaaggaaggaugaggguaaguguuguugggcugccuccuucuacacucuacuuucacuuagucuggaaugguuuucuauuauuuuucugggucucuuccugaggaaguuugccacuagaaaaaaaagcauuggggugcauaaacugugcauauuacugaguggauaugaauaggagauaaggauaaggaaguuuauguucagacuaaagagaugaagagagccauaaaaggaaagaagaaaagaagaaagaaaaggggucaggagagaaacagaaagaggcagagagaauguauuccucuacaggucuuagaaaucaguaauuuaauauauuaaaaacauaauauuucaaguaucuucuuucuucucuuaguuugauuugucagaucguuuugaugcuaguagauacuuacuuucaauuauuuuaccaaaccaauaaaagaagcuguguguaauaucagcaaggucauugcaaauuuguguagccaauagaacuguuuuguggcuguaauuuuuaaaguuauuuucacagauguauuacaaauaugcuuguguuuugacauuagauuguguguguucauauguguguguguuugugcauguguguguggaagaguggcauaugugaaauuuucugacugaugcuacgugugaaaauuguaguuuucaacuacugcaaagccuucaugcuauagugaaauuccacuuagaccuuuguugugcuaaauugaaauccagaguuugaauguauaaaucacaccaaaauauucuacagguaaagcaaaccuauucuuaaaagcauaagcacugauggaaaaccaaacuauguucucucuuaaaguuucaaaaaaggcacuuacgcaaauguaaugacagugaaaucgagccaguuccauggaucccgaaggaaaguaaaaucuucuaaacagaauccccuugcaauaauuuuuauaagugauucaaaaguauauauuccugugaagguguaucugaaaacaagcauccaaaaaauuugauaaaguaacaguguuuuuucauagcauaccaauuucuuaucacuccaucaguggaauagauaaauacuaaaaaagaaaacuaagcagauggauuuuaauuucauacaaaugaaacguagcccuaaauuuaaauucagcuuccuaacacaaagaguuguuucguaaagugucuuaagaguagugugagaaauacaagguauaugaaaucuauuuagccauugucugaaaugucuugguauuuauguaaauauagucuccugagaaauauuuaguauguuuacaugauggaauagccaaucaauaauauugcagaagcaugaaaugauuuucuuuuagggaaaaaaaucucaaguuuaauaguguucuaagaaugagaggaaacugacaaauuagcacguguuuuuuuuuuucuacaagauaauuuaacuugcuuggaacaaggacuucuuuaaaaucaaaguaaauacuucuaggguuauaagaaguaaaaauuuaauuuagaauaaaauucuucugauaauucagaaacuuagguguuuccaaaguuuaaaucuucuacucagaaauuggggugugagaguggcauaaaaucacaagaaaacuagggcgacugaaaaccuguggggccucccauauuagcuucaauacuuuagaauuuuuuuguauauaaaauuuauuauuuucuucaagaugucauguuucuuauugguuucagccuggaagugucuaggaaaggagacacucuuggaaauagguuggugcaaauguugguggacacucuuggaaauagguuggugcaaacauuagcuucaauugaagguaauggcaaaaaccacaauuauguuuacaccaaccuaauacuucuguaguugcuaugggucagcagcuguauaguaacaggcauuacaaauaggaagugugggcaggugagcagcuaugguuagaguagcccaacuucaguuaucacaaaucuggccucugugcuucgaagguauccccagaacagagagaucaucaauauaguuaguaaugcuucugguuucugaaagcucuacaaaaaguuccacuucuguuaguuuagucuucagucuacugaauuuucaaguucuacaacccugaaacuuuggauuauuuuucaauuuguuggugaccacgcuuggaacuauauuggccugacaugaagugaaugugccugauggaaaugaaaacuuugcgagguucaauguugucuucacauggcauuuguaacuaacccuuuuugauucuugauucaauguauuuaucuggaauuuaacuggaaccaaugucuaccauauuggcucuuuucugcaauugcuuugaccacauuugguuuggcuacuguagauuuuaaagaaaaagggguaaauguccaagagugguggucuucaggugaacaccagguacaggcaaaagagagugauaaucaguauaacgccagcaggccugagggccaaugagcauuguccucuugcugcguaauuuugucuaggaaugacuuuaauaaaaugcucuucaguuuuauuuuaagacuacauuaagacacaguuucaaaaucccaaauguauauauguuauuaaaaauauaaguugaacuuacucuacauucuuuguccaaucaggaggguuacucauugucauaaacacacaguuugucaaaauagugcacauaauuagcaugcugaauaauguagguuauuguuaaggaacacacaaaagaaaaucaaaauccaaguguuauauuacaaaaagcuaacauugaaaagcccaaacugcagcuuagccaaaauucagggauaaaugcauugugggcaagucuucuaaucuccuuacauuucaauuucuucauguguaaaauguggguaauaauaucaccuucacugaguauuuguauagauuaaaugagguaauguauaugaaagcauuauaucaguauaagguguuguuuuuacaacuauuauuaaaucaauauauucaccucccagagaacuucagugggaagacuauuuuugugcuaccuggaguugcacaguuuuucagcagaaaguauugacuugagcucauucaggugaauaaacuaguaaauuguugaggaaggccacuuaucugcaauauuguaauuucuuaaacacaucuuauccaacacaguucaacgcaugaaaacaauuuguagucaaaguacagcacgaugcuaauuguuggguugcucuauuuugacugaguuuauacaagugcagcaggauucgauaacauuaaaagugaauauucuugaagguugacacuuaacaugaugggaauguaauuaaaauucaacauagcaaagugauguuggccaagagacucaaccucucugugccauugccuuguaucucuuccuacuucucuacaauggagcuaauaauguacucauuuuguaauguaaccauuucuacaugcagauuaaaugaguuaauguauuggaaaugcuuggaacagucacgguacguaaguaaauauacucuaagugguagcuaaaacaaaugaacagacauaacagaauuauaaaacugaaagggacccuaaaaauuaguuuaucacuauauuuuaaaaaucagggaaauaaggccuuacuaagcucuagaggaaucagauaaaggguccaggacuagaauauaaguuuccuacauuaagauccaauauucuuuccacuauaguuuacugccaaaacaaaaauuuuccauaauugaaaaagaaaguuuucaucaaaugaccacaugauggcgcuaggaauacaaacugggacaaggaaacuucccuaaguauaaaaacccuaucauaugauuuuuauguuucaaaucuuuuaauuuuaguaauagcauauuuauaccacuaaagaaauuucuugcugucauauuaaaauuagaauggccguucaaauuuuagaauccuuuaaaaaaaaguaugagcuuaugauaauuauaaugguauuuuaauaucuauuauugucaaagcuaucaaacaagauacaaucagaagugaauuguuuuccuaaauugauuaacaaaugaauuuagucguggaguccuuuuuaacaccaaugggaaucaugaaaccaaaucccuuaagaccauuuggaaauauaugccaacuucucucauuaacuuccggagucuuuacuaagcaaacaguuuugcauggcagcaucauaacucaugacuugaauuugaaauucagccaauauuccaguacuuccuucacaaaaaucaucaggaaauuucaagaauuaacuaaguacuggccaaagacuccugacauucucugacagaaaauauacuuaaagguuuauucuaagauacacugaaguguuuuauaucauaacuauggauaaacuugagucuggaaguagauuuuucuguuaucauaucauugcucacugaaaauucuacaccaucacaaacuuuguauaaagaugguagagguaaacaugguuaucuuacuuuagauuuguaggauucaauacauauaaguguuuuuagaaagauaacaaaaguacauaaauacauguuuauauauaauauauaaaauguuaaagaguacauguuucaguaaugucuaugugauuaaugaacuuuaagaaugaggcuaauaugacaaagaugcaaaaugagagugaugaaaacuauauaauauggacauuucccaacuuaauuugauauuuagcuauaaagugcuuacagaucauguacaaauaguuaauauuaaucacuugaaaaaggauaugaauguaccaaaaucuuaauagcuauuuuccuaagaggauugaagggaguuaaaauguacagggcagagguggcacugaaccggaagauggccuucccuuuauucaauacuauaaaagucuguaagacaggaacacaacauagaaguaugaaaguauaaaccacuuaaacucuguuaucuacuuucuguuacuugucauaauaaauuauuguaaaguuaaaugagaaaccagcacaaucacaauuucuaaagugccccaugaaaacaaacugucacuggaucucuucuuaauuagagaggaaauccaaugauaccacuuaccuuuuaccuaauacuuacccucaauuuuauuguacauaagacaauuagccaagagaagucauuuauuuucucgauauuuuaagugucugaguuaaaugaaagucuuaaaugggugcacauuucauuucauuccaaaaaacuuaaggcacuacaugcuuuuuauagucauuucagcuuucccaauucaaauaucuugaaaauuaauccuguggaacgcaaaaucauucaacagaacugauacuauuuuugaaauaaagauuguuuuuaccaucuauccucauaaaauaaacauuaucacucucuucguaauagaaaauaaaaacagccaccaucaaacccacucuuggguuagauggauguaauccaauaauugauuucuggaggccaagaucccuggagaguacccguugaccaggagugcuaaauucuguacugggauuucugaguuagcugacauauugaauucuaaucccaauugacuuccuaucuuaugcagugcuuucuuaucacagaggagaagcuccaagcuccugaagaauccaggauccaugaaugugaaugaaauuccuuccaaaaauuagacuuauuugagaucaauuggcagugggcagacaaaacauuaaagaagcaacauguaaggguauaaaaagggcucugacucaauguuuuccaaggugcuuacuuauauuuagacagagccagggagaaagccuuuaucucugugaagagcauauuuggggaaggaaauuuuaagcuucuugauuuuaaauucacccauucuucgaaagcuuucuuuucuaagccuuaggaugcauaucugcacagaucauguuaugauacagcaagcauaaauguuauguuuauuuucuacuaagaaucuuuguauagucuuagcucauuaacagauuuccccuauacuugcaggauuuucuaaauucaaguaaagcaaacccacccucccacaccccuaccugcuaauggaguugguuuuugaaaauuaagcacuuucuaucugguauggguagaaguguccuaaacuggcugugaaaguauggucccccaaccaguacugguuaaguauagauauggagaguccauguuuagaaauuuguaaggcaauuuggccaauuaauguugugucugucuauucuaauaauaaaaaaguagggggauguuguugugggccuguuuuucauuucaguuuucuagaaacuaauuuuuacuucauuuuauagaagaauagagaccucacauccucaacagaguuugagaagcacugcuccaagucucaccucugccugcauucccucuaucaucuuugaaggaguaugaguccagaaaacagauagagcuuuaccacaaagcgcauuugaaggaagggagaauuucaccugugcuuacuagaagaacaauccccuaugccaacaauacuuagcccucuuuuucucugauucauugagggauucugucccugaaugacauugugagaucaucguaaaucugaacagacuugugcaaugcaaaugccuuugcugugggggaauaugagcauguaacgacacagaaaggcccaaagugagcuagcucaggaauaaauaugguccaccuuucaaauguacugcauauacuuccuuuccccccagauaugcugaguaaaaucugaaagaaauauuaggggcucagauggccagucgcaguggcucacgucuguaaucccagcacuuugggaggccaaagugggcacaucaccugaggucagaaguuugagaccagccuggccaacauggugaaaccccaucucuacuaaaaacacacaaaaaaauuagcugggccugguggugggucccuguaaucccaguugcuugggaggcugaggcaggagaacaggagaaucgcuugaacccaggaggcggagguugcagugagccaagaucgcgccacugcacuccagccugggugaugagagcaaaacuccaucugaaaaaaagaaaaagaaauauuaggggcacagguaggagaaccaguaaaaauauaacacagaauauauauauuuuaaaauaagaaucucuugauuucagauaauauuaaaagcuaauuuugaaacaaauaguagugauacaaagagauaaugagaaagaaaugacaauccauagauggccuaaaucaugggcuggagugugaggauaaucaagaugguacuguuuguaccuccguggauaaggaaaauaaccaggcucauccuaaggagacaggaccauacuuagaagagaacaccugugaugcuggcuccuuggccacuguucagcccaaaccaugaccagagguaauaaaugaccaaaacagaaaagacagacaaggagugguaaaguaaaaggcaaagcuagagaucuaaaagaagggaggggaaauauuucugcccugaguacuaaaaaguaaaagaggcaagauucagaaaccaaacacaaaagguuccaaaaaggaagucugccuagaaguaaaaagagcagaggauucuagacaaaaaucggggaaagguggggacagagagaaaucuguuaaaggacacaaaauuacaacuagauaggaggaacacauucuagcucuccacaccacuguaggaugacuacaguuaaaaauaauuuauuauauaguuucaaauagcuggaaggaagauauugaauguucccaacacaaaaaaugauaaauguuugagaugacggauaugcuaauuauucugaucugaucacuauacaucauauguauuaaaaccacuauaugcuucauaaauauguacaauuauuacgugucaauuuaaaaaauaagauaaaaggagguauaaagggcugaaacuaaguaagaugaguuuaaugaaaccaaagcacucucaauguugguaugugauucuaaaucuaaaaguccuuugacauagagaaaauuaauacuuugacacaaaaguuaaaaacaaaugggcauaauuaucaauuguucaagccuuagaugaaaacauuuacugauuuuacaguguauucccuuuauucauuuuaaaaauuuaaagaauguguagaagauuauuugguaacaagauuuauaugugcaauggaaaauacuugcaaguugaauuuauaaauggaauugguaagguuuuuacugaacaacgguauuuguuuugcuuuaauuuuucauaagacauacuguugugcaagacauccuugcuacccaggaagcuaacaauaaggccaacauuaaaggaccauuuuuucauaggauuucuucugugagaacuccauuuuucucagauugaaacauacaugcuuauguacaaacuucauagauguagcuuuaagguauugauggauuuuaaacagccuuccaauaaagcaacaguacccagacuuguauagcaacccaauauguauaauuuuaaauaugauagcacuuucaugucagaguaaguuccauuuagaaugucagucuuauuauauguaauugaucuuauguuuguuuauuuccucaacugucuguaucuuaccuccuuguaauugcuuacauagccaagaagccgaucauucaguuuauaaguguuaagaauuaauaaaaggauacuuguuuccaaggacucucagauacagcuuucucccaaaaguggcauugaugauauugaagggagggaagagucugaaggaaauacuguuugcuuacaacaaauacuuaaguagcucuagaguuuucaaauauauaaauauuugccuuccccgcuauacguauaagaaagggcuccaagagggaagaguucaaagacuagcuaagauauugcuguaccuuaaacuguauaaacaaauauuguguagcuuuaagcuaaucaagauuuaugaacuauuaaauugggugacuuuuuaaaaacuuuuuaaaagaauguauugguuagcuuauuauagugaaguaucuuagcauccuuuaaaucuaauuaguucaacaaagauuucauuaauacaacuuaucaggauaacuuuuauugcauuaagucauuugaauaaaaaagaaacaguucaaaguuggugguggaggagaaaagguuuauacaguaguaucuagcccaaaacaaaccccuuuuuaccacccaaggcucauaggaacauugacaugacuggcuccacuuacaagcagcaagacuuugugguuuaguacaauucaggcacaucuaugacuauucuuaauauuuguccuucaguucauuuuagugccaaaacaaaugcuuuaauugcaguucuacaaagaaauagaacuguuugaaauuaauaacaucauuuuaacacguggauaauuuucugcuucaaaacaaauguugaagcauggcauuguaacugagguaacaacuagauuuuauauaugaaaaaucacuuuacagacuuauuugcaggaauguaacauucauacaauaggguuguucuagcuugucacuuaugucuucauauacagguaccaaguuuauugggcauauauacaauaaguugguaauuauguaugagcagggaccuaguuuagguccaauuguuaauuucaauugauggcaauucagaauacauguauuaacuguuuaguacaauauuugcaaugcccugugcuacauucuaaagagaaaacaaagauacauagguuaugacaccaagacauuuauaaacuaggagaugcucaacuauuuguuuuaauagaauauagaagaauugaugaagguuaccuugaccagcacuuuccaacagaaauauaauguaagcuacaaaucugagcuacaguuaugauuuuaaauuuccugagagccacauuaaaagaaaaacaaagcaggugaaauuaauuuuaacaguauuuucuuuaacccaacauaucugaauuauuaucauuugggaaugaaauugauauaaaaaauuuuugagauauguauauuuuuauacuaagucuuagaucuuugaaauauggaguuacacuuacauauuucaaauacucaauagcuacacaaggcuaauuaaucucugcuauauugggcagcacagaccuaaacuuaaaccauccauuguucagcaagcucauaccuucuucagcaauccuugccauguaaaaaucauuucugguuuuaaagaaaaagcaagaaggaaguuauauagaaaaauugguaauaacccugguaauuaacaguuuaauaaucugggaagcaacauuaugaaaauauaaguaugauuuguuuuaucuuauguuaagggugcaaacucugaaauuagauuucugauucaaaagcuaacuuugcugccuuccagcagugugauccggaacagguuucuuaacuuucugugacucaguuaucucacuugaaaacagaauaaauguacuuagcucauagagguaaugugauuccaauuuagcuggucagauuuugauaccuaguuuuuauacuuuaaauaaguaauccagaugauucugucauagcagggcuguuaauauguuuguuaccuaaugguuguaaaaaaucacaaaccauuggccaaauuaucaaugauuauguuguacauguggauugaaaucuugccccuugaucuaacugaauaguuacuaagaaaauaauuauguuauaaugauuugguagaaauugcuauuuaugaagcuauauuuguuauuaucuaguaaucuuuucuuguuucugggcuuauagaaagugauuuguuuacaauuuuuucccaggauggacauugaauuuaacaagccaugguuuuccaguuucuuuuucucauuuaaauauagccauuaccuuaacauuuauuucaaucuaggggccauauucuucaaaguacauaguuuaaacauaagcuguaacuuuguguuucaucuaaacauuauugaaacauugccaaauaacaggacugacuccaaauuuauugcacuuuccuacucuuaaaguaaaucuacuggcaaaaacaagaaauaacacaggaaggugagcuaugaugaugaacaauacacaaaauguagaauauacuacugguugguuaaauuuauccuuuagcuucaaaguuugaaacaggcaauuuccaacuuguacaugagcugugcuccagaaaugcauuuggaagucaauuguuuggaaaugugaacauauauucucacagauacacauauauuucuagacccacaggucuaucaaacuguuaaugaaguacaauucugaaugaauggcacugagaaacuuuaucacuauguguaagaaaguguuacucugaaaauggcagaguucuguccuugaaauagccuggaagucagaccaggaaaauuaucuggcucuagcuccuacccagaagugcuauuaaguuuuucauagcucuaagcugcuggcuuggaaagagguuccagcaugaagggggagaauuagagccauguugcaagaggagagaugcuucaaaguuuugggugugaagagcagcauagauggucaggagauuccauuaguauaauacauaucucuggggacauuucuuaugcugggucaauuccaugguauauaauauuuuuuccccaaggacuuuaaauggucucaccuacuucccuucucauuugucauagccugugaguucaagccaagcuuuucuuccuuuucuggcucacugggggaugaaaaguuuucuugcaggcuuucuaccugacucugaagagaguaugccauauuuaauauuuuuucaucuccuagucucauucaauuuuuuccuuccaaccagugauaaccagacuaaacaacaaucugugucacuugccuacccgugggccaccaagcuuuaauauauagccuucacuuaaugacagaugugguccuuaagccacagauuacaaacuaaaaugcccacagaggcuaagugacaauagguaccugccaguuuuaggcauauaagucagugaugccugaacucauauuucaagaggaauccuuagauguauaauuuuaugagugugugaaagauuuucugauuuauaaaugccagaaaauaauucaaaauuauaaauaauuuuguuaguuuaacaaaacaugucuguggacuccaugccucacagucaguuuuuaaacauuguugccauaugcucacacaaaagagaagaauuuguaccuagagaagagucuguaaaauugcuuguuccuaugcuuuagcuggguggaggguuggggccaguggaggagauaacucugcagaaggugccucccuagaaagugccuagguaggcuuuugucagccaaggcugcagagcccucaaccucuucuccagcagagagaagaaauuauaacaacaaggaaaaagaauaaaaucuggagcugaaacauuuuucagcccuauaucaucagaauguacauaccaugggucugcuacacuauuauauggucaguuaauuuuucuuugacuggaaagaacacuuuugagcccagcuugauuacaagcuugcugugugagaacuaugagcaaacuauuccccucaauuucuccaucucaauggagaagauuauacuaauaccaaucuuaggauuauuuugaggauaaagugaaauaaaacaugucaaugcccuuagugaauucuaaagugucaauaaaaauauaaggauuaaaauauuuaaaaugcgucucuguauucuaacucuuaaauauacacauauaagaacauuucuguuucuccaaagcauggccaauuuuaguauuggaauuuucagguucaguaucuuucuucucaaacuuccuaucuaagaaaaugaggccaucagcuuccuucugucugacaccuaaacaccuccaaaaccaauucugacucuauccauuauucuccaucuccauugucaaaaugcuagaucaaguauaaaacuccuaaauuucuccauagagaaguugagugauuuuuaacaauguaaaguggaccauguuacugcuguaccuaaauacuuguugggaauucauuuugcuuugaagauaaccuucaaacucuuuaagauguacugaaagauccccuuuaucuagccccaggucuaccuccccaaccucaccuuauucucuucuuaccuauuacaggucagcuugauuauaugucuuauucuaugcuguucucuuuccuuggaagauucuccucucccuccuccuuuuuaaccuucagaucccaauuuaaaugccauuuccuuauagaggcacacaauuuaaauuuccugaauugauccucuuugaaaauaggugcuuaucacccuacuggaauuuagugggaaaaaaaauuucuaauuauuuuagaagcuaaucuagaucacugagugucuaagauuuuaguuuuuccuuugucaccucccugucucugucucagaaacagucccaagauggugauguugauaaaaaugaauaauaauaauaaauaaauaagguuuuacaaaggcaggaaauggccaaguguugaaaugaccaguaaggguucgggaaauacugccggccugggagaccagaaucacaucuugcaaaauggcaugaguaggaaacaggaaggacagcuauaggcuuauuuagauuccaucacugacuucucuuuuuuuuuuuuccacugcugugauuagugcuaugacugcaaauccaaacuaacauggcaaugggccauggaaacucacuggucuaguuuuaaaacuagucuuaggcaaguuauuuaaacucaguuuuauuauuuuuaaauaaagacaagagcuaucuugaaagaaucuguggauuaaaaaagaacaguaauuauacugauauuauauauagcauguagaguacauagcuuuuuuuuuuuuuuuugccugcuuaggacaccuuuucuaacaguuccucuucucuuccuuuuggaguaaaucucugccccacugucuucccauguggcuugguggagcugacccaccccuuggcaacacagguuaguauaugacagagaccaucccauaccaaggagaccaucacauaccacuagccaaagugagugguucagaggaggccaugugaccuaauuagacucaauucuaggacaacugcuagagcuuuugaaggaaaccugggccuuuuuucuuucuucuuucuuguuuuagcagaagauaguaguuacaaggcuguaggauguuaguuuagcaccacugguggcuauuucugccaucuuguggaagagccagccugcaaaugaagccagcaugggugacagcagagcugaccauggaaaaggaguacccucaugacauuguuugagguacuggguauuuugauauuaaaaccagauucacuagacacauuuccuuuauuuuuccccaaaaguuguuucuguuggguuuuggaaacuuucaguugaaggaucuccuauagauauggcagauacucuaaaaaugccaagcaucauuuuauugaucaacaucaccaucuugggacuguuucugagacagagacagggaggugacaaaggaaaaagaagcacaaggaagaaauagugcauagggaagagaaagauugggaagucaacuacaggguccuggauguaagggagagucugggugacuuuuaguuuuacaggagcugaugauaagcaaagaacagcuacacacuggggacugcccauaugacaauucgugaaauuauaagcuuuuaauaaucauccucuuuucugauuucccguuaauuacuuuugcaagaaaaacuccauaauuccaauuaaaaacaaaacaaacucucuccacccaauuuaacaacuaaaaacuccuuuggcagugauagaccaaacaugaauuugaaaucacaaauucauauaugacuucucauggagcccaagaaaaagggagugugcaucuuuucaggacaguugauagcaagagagaauaaguuacuuuuaaaugauccauaggacuuuuuaaaaaugaaugcauuucugcacuccauaauuaacaaacauccauuuuuacuacagaucuaaaaugucucauucuauuuccaguaaacugucacauuguuaaaaugauauuuucuuccaugguaauaaugauucgucuguaauuuuaacaagaacaugagaaggaagacauuuucuguaauaaagaguggguaaagaauuugaauguagggccaaaugguacaaaaucagcccaagcuaugaaaggaaacugugaaaaaaagucccgugagggaaaaaaagguguguucacaagcuaaaaugugccuugcuacacagcuaaaguaaauaaacaaacaaagggaaaccaaucuggaaucauguucuaaagaccacugagucagagcuaacaugauaugaaaaauacugucaccauauuaugauagcauuuuuuuccccugaguuuuuaaccuggaacucugaaggcuuaaaacaucugaggaucuaaaaaccuucuaaugcuucuaugcaucaggaauguucaugaugcauagaugcuacuauuucuuuaguuacuacuacaauauuacugaacauggauuaaacugcuuuaacaauuuuaguagaauauuugaacauuacauaauuugcacaucuuaaacugggacaaagaggauaaaaauaugugggcauaugccauuggaaaauauacucucagcagugacauuuuaauaagcucacugacacugccuuuguaaaagauuacagagagcuucaguguggugguuguguuuuuucuauucacauaaauuccuugcauguacacuacugcacuuuaacauaaaauauaacauaaggaauggauucugcaaauauuuuuacaauuggcuuguuuugucuauuccauauaguugagaaagaaaccagagucuuuguauacugaugcaaaugacacauuaacuauuguacuagaguccaacuuuagggaaaucacuagucuaacugcauauuccauuucacucaggcaaaucuaauccacacccccaguaucagcauuaguggaaaaucucguccuaauaaacauuuucccuggugacauuuccacuguuugaccauuuagcugugucaagaguacuguguauguguaccgcauuguuuuaaugaagaucacccagccaaucucagauaacccagucacuaaaguaaaauuagucaucgaauauugaaagaaauauucauuauuuuuaaaagguucagauuuugcuaagcauuccaacuuuagucagagcaaauuaauuccauuuaaggauauuuuucaauacugaaauaauccaauuagaaaagaaaauuaaaggcagaaaaaaguguacaggcaacuuauaaaagucuuaagacauaaaaaugcagaagaaggaaauuucaaacacauaacucaaucauguguucuaagcacaccauguuaguuuuuaaggauuucagcccugcaaaaagcuucgugugcauugcuguugaaugacuuacauuugaagauuugcuugcugucaguucaauguaaaagccaugaguauaccuuaccuuggggaaaacucuuuccugauaacaauauuucccuuaucagguuguucuacuugcacacugugauuugcuccaaaaugccaaaaugcuuuucuuuccucauaccaugugcauuugaagauaagaacagaagauguuaagagcaaguuuagacgugagccuaacaaaguuuauaaggguuuccucgacacaagaaucuggcugucacuucaucagaguuggccuuucacccucaguuuuaagauguuucuuuugaguauuuugaaaauguuugcacaauuuuguuuuacaucugucuuuauauccuuugcuauauauaauucauuauaaaccaauuauggaccauuuuguuuagggacauccccucgagacaaucacuuuuaucagucugaaagcucuuuaauuaaagaaaaaaaagauugauugguuguucugguuuccagaugaagaaugucuaccuuugucaacaugcauuaguuuggucuuucucaaaacauucauuuauuauuuuacaaauaaggacccagcauaggagcagagauacuaaauuucuucccuguuugauuaagggauagaugcuggguggcuuuaauaauuuuuagauggugauugcuaccaaagaggugaggacccggugucuggggguagcaaaaggccuguugaggauggagcccacuaacauaucccaagagcagccucugaauaaacuaaaaguauccaauggcuauaaauacaguagcauacucuauacugugaaugaauuucugccuggaacacaucagucuucacuucaauaccgaagucauuuuaaacgaauuaaaauguuuaggcaauuggauuaucugcauuuuuacuuuucuuauacaaauaaaguccuuguaguuuguuuaguuugggcuuuggcuuuucagauacauuaauuuccaaagaguugauuaaauaauaaagugcaacuuuucucauaacuuaaauggcaguuaugagauuaauaaucucuuaucaacuaagauuugacaauaugguguucaaaagcaaaguuagaggaaaaugaaauacauggaaaaugauccaucccuuccucuacuguaaaaugaauagaucaguuuuuaaaaaggggaaauauguagugauuccuaaaguaaauccuaguaccacugucaacugauaauuuuaaauguaauuuagauuuguagaugguguaacauuaaaguuguauaauguuuaaaaaaaaaaaaaaaggaaaauacuggccgggcgcaguggcucacgccuguaauccuagcacuuugggaggccgaggccgguggaucacgaggucaggagaucgaguccauccuggcuaacauggugaaaccccgucucuacuaaaauuacagaaaauuagccgggcgugguggcaggcgccuguagucccagcuacuggggagacugaggcaggagaauggcgugaacccgagagguggggcuugcagugagccgagauggcaccacugcacuccagucugggccacagagcgagacugcgucucaaaaagaaaaaaaaaaaagggaaaauauguuauacuuaaacugacuauauccugaaaaguuaaaaaaaaaucugaaccuaaggcuagucaaccuuuugugacgcucuuuccuccgaaacuguagcugucaaucggaagugauuuauaaaacugccucaaauucacauauuacaaaugccaaacuuuugcaugcauuuggcaaggacuaacuucacacagaacugggccagaaacagagucccuaaaaguuuaggggguauuuuaagguccagguccaacaaaaaaauuuacuuaauuacaaucuuugugcccuaccuuuccacuaagauucacaaaugcauugugucaagugauaaagaagaaaauguuacgaaucaccuaacgucauacauuuaauuuaaaaucaaugcaauaaucuuaaaaaaaauuuuaugcuuuuuguuuugguuuggugaaaugacagucauaaugaacgguuggaugcuuaacauaagauucauuucaagcauggauaugaaaaaagcacgcauucaaauauuguuuauagguucuucagguuaugacauuuuuguuaauucuugccaauauuaguacauuaauaccaaaauauuaaauaacuuguaaaauucuaguuuauguaaaaauguuauuuuacagguaacaaaauuucuucaggaaauuaauugauuuguuguuuauaacaugacauugaaauugcaaacccuuguggcaucaaauuuguuugcaugaaaaauuaguacuaauauuuuguauagucuuuauaacucaugauuuugagauuuccaaguauuuccaaguacagaaaguacaaaaaaauuguauaguaaaucgaaucuguggagagaaucugucaauuuguuaaauuagcugccucuuucuuuccuuccuuccuuccuuccuuccuucccucccacccucucuucuuucuuuuuuuuuuuuuuuuuuuugacacagucuugcucugucuccaggcuggaguguaguggcgucaucucggcucacugcaaccucggccuccaggguucaacaagggauuccccugccucagccuccugagugacugggacuacaugcgugugccaccacgcccagcaaauuuuuuguauuuuagcagagaagggguuucaccauguuggccaggauggucucaaucucuuaaccucgugaucugccugccucggccccucaaagugcugggauuacaggcuugagccaccgcaccuggccucuuuuuauuugucauggugcauuugggacaguugcauauguuaugauauaaucaauucauuucucauguauaugcauaaaccacccacaaauguguuucauuucuuaaacagaaggauacuuaagauuuugugcuaauuuggcauguguuggugcuacaacaguccaaggaaugcaguaggcaauuagcagcaaaauaugccugauaaaaaacacucacuuucuuauugauauaguagggguccagguccuccaggggcucugacaccaucucuggaggaaugucuccauaaauaaauggaagguucuuuccagcuuccaagucacuauuuggcuuugggccauuuucgucgucaucuuuuuugucugguuugggauucuuugccuuuucuucugcaaugcgucuuucaauagccgcaagagauucucuggugaagaaguugaagcugucagguccuggugguacaagcacuguuugcuccaucuugucauccugcacauuuuaauuaccauuuauucugcauaugaaauuccuaaaauaaaaggaauacagauauuuuaaagaguggacuaagagauguuaauauaaauaaauucuugucaugaaacaugagcuagaggauuuaaagucuguuuucuccuuaaauugaaaggugauuucuaaagaaaaaauuuuaacacaaaugguuucuguguugaguuuaguuaagcaucacuuauuuauuaauucuugugcuuuacugauacaggaacugugccaugaguuuuaaaagugguucaaauauggccuuaaucaaaguacauuaggcuaauuaacacuauaucacuaaugaguuauucagucugugacacacccagaagauggagacugugcguauaaaggcaaaggauagcucauuuaacaaggaugaggggaaaaggaauugucucugagaggacauaaaaucuaacccucuaggucugacaagugauuccuggccaagauagucaggauaguuugcagugaccaaccuuaaugaccaaucaaauaguuauugcugucuugacugggcuuuaaccucuucuaagauuugagacaacuggaacuauguccugcucacuucacuagccaugcaugguuggcuuacuugaacacauaaagauaaagacaguccacgguuggacaaaugucauuuaugugaguaagaaggagaggaaaacuaggcuguaaagaaauugcuagauggagguggggguggaagaagauagcuguaggugcaggagacagcaggagucuccuguuucaagaaaaaugaucagaaagaagucagggugccauaaacucaauagaaacuaaguguuuuucuucacugaagcaauaaugaaauucuugcugauucuauaguccuauagugcuaaccauauuaugaaggccugaggcaaaaccgucaaccccauacagcagagucagaccugaucugaugccagacgccaaaucccaaauguauuguuuuaaggcauauuuaauaugagcucagauuucacagauauuacugagccaaaauauuccagagccuaagcugccacuuggccaugaauuuuauuuggagacugcauuaacucauuaaggucagcaagcuaugguacaguuaauuauagcuuugguguauaugaacuacaauaagaaaauugcaggcauaauuauuuugugagggacagagaccucaaauuucaaggagguucucauuguugugagguuuauaaccauauuuuucagaguggaugaucaaaagaagggaggacucaaguuuaaauuuguacccuuagucuacuaagugaaguuuucagcgguucuuagaacuuaaccugcaguuauuuaguaccugcaagaauagguugucuguaaaucaaugaaaacugaauguucugucuacaaacucugguuccccuacaaggcaucaggaaaauacuaacauuuauuuuuugcaaauaaaaguuuagggauaacaaauauaguaacuuuucucaaaagggaaauaaaauauucugauguauauauauaguuuuuauuuuuaaauagcuuuuugauagaaaauauauguaaaugauauaaaugcaaauaucuaaaagaaaaugcaguauaauaucuccuuuuuaccuuguuuccccaggcccaguuccccuuccuagaggcaacuacuacuacuuaucucccauauauauuuccagguauucaauagguauaugcuagaacaugaguguauguauacauauucuauuuuaaaauacauauucaaauggaaucuuauuauacaaacuguuuuacaccagcauuuuuuacuuaaaauguauauuagaguucauuuaucuuaauuuuuauagauuugacucguaccuauuacuggcuacauggguuuccauugcauguuaugugccauaauuuauuuaaccaauucccugaaugugaguauuuggguuguuuccaaucuuuagcuaauauugaauaaaguugcaaguaauacauuuuuacacacauacuuucaaauauauguggauauauuuauaaaauuaauuuuuaaagguagacuuggcuuuguacagaauguuuauuuaugauaguuacugcaaaacuacuuucuauggaguuuguaugaacuuauucuccugacagcaauguaacagagugccuauuuauccucaccaauauaauauguuaucauauuuuugauauuuccaaucugacagggacaaagaugagagcauauuauaauuuuaauuugcauuugucuuacuaugagaaaaguggaauauauuuuucuuauacuuaagaauuauuuuuuauuuucuuuccugcaacugcuuauuuaaaaacagcccauuuuuuccuucuauuuuuuucaaucuauagcaucuuuuaagacaaaauauuagccacuugauuuuuugauguguggucuuuuaaaaauguauauuuuuugacuuuauggugcuuugugcuacagauuuuaaaagauuuaauuaaaaauguuaaaauuguuaggugauuaucuaauucuucuuuggcuucuggauacuguauaaugcuuagaaaggcauccagagagaugggcaguaagggguaggaaaaaggauauaaaauauauacauacacacacaugcaucuguaucaccuuucccucuuguauuuuuaguauuuuggugguuuaauguuauaaguuuaaauauuuuaucuauuuggaauuuauuuucuauauggagugagguagagaucaaagaacaacuaaauaaaugcagagacaguccaugucuuugaauaggaguguucaauauaucaaagacacuaguucuucccaacuugaacuaaagguuuaauuuaauuucugucaaaaucccagcaguuauuuguggauauugauaaacugauuuugaaguuuauuuggaaaggcaaaaaacccaaaagagccaacacaauguugaagaagaacaaaguuggaggacugacacuaacccaacuuuaagacuuacuguaaagcugcaguaaucaauacagugugguacugacaaaagaauagauaaguggaucaauggaauaggauagugaguguggaagaaggcccacauaauuacagccaacugaucuguaauaaagaagcaagguaauaaaaugaagaaaagauagucuuuucaacauguauugcuggaauaacuagacauccaaaugcaaaaaaaaaaaaugaaccuagaccuuaugccuuucacaaaaaauaauucaaaauggaucacaaaucuaaauguaaaaugcagaacuaaaaaacuacuagaagauaauauuggagaaaaccuaguugacuaaauuuguugauaacuuuuuaguucucuguuuuucuuggaacugucucaucuucauauuugaguucuggaauauuucuggugauauucucagugcuauauauuuguuuuugguuuucuaggagugauggugaggaggaauugugccagcuugcuucuucacugccauuuuggaaccagaacucaggugaugacuuuuuagauauaacaccaaaggcacgauccaugaaaaaaaagaauugacaaucugauaucauuaaaaugaaaaauuuugcucugugaaagauacuaucaagagaauaggaaggcaagccacauacuaagaaaaauauuugcaaaagacaugucugauaaaggacuguuaccccaaacaugcaaaaaauuauuaaagcucaacaauaagaaaaugaacaaucugaauaaaaaaugggccaaagaccugaacagacacuucaccaaagaagacacacagauggcaaauaagcauaugagaagaagaugccccacauccaucauaugucauuagugaaaugcaaauuaaaacaauaagauagcacuacacccucauuagaauggucgaaguccagaacacuaacaacauuaaaugcugaugaggauauggagcaauagaagcucacauucauugcuggugggcaagcaaaaugguacagcaacuuggaagacaguuuagcaguuucuuaaaaaccaaacauacucuuaccauaugauccagcaauugcauaccuuaggauuuaaccaaaggaguugaaaacuuauguccacacaaaauccugcacacggauguauacagcagccuuauucauaauugcccaaaccuggaagcaaccaagauguccuucaguaggugaauggauaaauaaccugugguacauccagacaauggaauauuacucagcauuaaaggaaaugagcuaucaagccaugaaaagacauggagaaacuuuaaauacauauuacuaauugaaagaagcaaucuaaaauggacauacaguaugauuccaacuauaugacauuauggaaaagacaaaacuacagagacaauaaaaagaucagugauugccagggcagugaaaauacuuugcaugacacuguaauaguggacacaugucauuauacauuugugcaaacccauagaauguacaauaccaagauugaauuauaauguaaacuauggacuuugggugauuaugauauaucaaauuggguucaucaguuguaacuauauacaauaccuaaacacugucucuaaaauagcucuugaaucaaagaggacuuugauucuaauacauauaauauagcacauauguuaaaauauaccuauauacaauacagguauauuugaacugcguuuaauuuguuaauuuagggaaaaaauuaauuuuuuuccuaaauuaauuuucuuccauuguauuuuuucucuucuaaauagauuauuuuuacaguaauacauaugugcuacucuggugcgagauauugauaguugggggaggcucugcguguguagagaaaggggaaacucuauauuuuuggcuuaauuuugcugugaaucuaaaacuacuguaaaacuagucuauuucaaagagaaaaaguacaauggaagaaauguuucuaaauacaauguaagcauuuuuuaaaagcuuugaauaaaccaaaaguaaauauaaauggauggaaaguuauauccuauuauuagauaggaaugcuauaucauaaagauauuaauuuucccuaaauuaauaaauuaaaugcagccuuugaaaaauaaucacaaaauucauauaacuagagaaaucuauuugagacuucauguggaaaaauaagcaaacaagaauaaccagaaaauucuuaaaaugaauuuugguuucaaaguccucacugaugcaagaacuauuuaaaagaaaguguuuaaauuuuucaaaugauagauuuuccuucuaaguuuuaaauuuauguuuaguuuuauuacccuaugcucugauaauguaguucguaccauuucuguuucuuggaauuuauugugauuuauuuuuauccuaauagagguuguuuuuaaaaugacuuuucuaagaacauuaaaaagaaacuuauucuuuauuuuaaagcaguagaguucauuaugccucaauuauauugaucuuauuucuuaucuuauguagaccuucuaugucuguacauauuuuuuuucuacuugacuguuccaaguugggagaggcaaauuaaugucuauuuaauguguuuuuauuuauugugguuucugucauuuuuguucuaugaauuccaaugcgguauuguuugauguguagauaacacuuaugaucagaucuuuggagugaauugaacccuguacuuccuuaaauggcccuuguuuaucuuacuguaguuucuucccuuuaaagacaacuuugucucauagcauauaaugacuuuaauuucuacuuauuugcacuuaucuaguaugucuuuuuccaucaauucgguuucauccuuuucauuuuacuguuuuagcacuuuccuuaauauguauauguuuagauaucauauauagguauauuuuaacauaugugaucauuacgacaaucaccgucuuucagagugccacacuugauguuauuguccaugaaguugugugaauggacagaaacaguuacuaaaagccuuccuauucuccagaaauacugcauuugagaaaagcucucuaaagaaaaucucccuggucacuagcuaucauuuacuggagaaauaaacaaccaagaaaguagaagacaugaauucuacacugacaaauaugaucaguucaaacguauuauauauaauuauaaauuaguuagauacaggaauuauauucauauguaagcaauauaacccauauuauaaugaaaucauacugauacuagaaaaaguauuuuuuuaacucuaaguagaucuucuauucaaaugcuaccuaaaaauaaauuauguuauauuaauuauaagaauaaaacucauuaaaaaucucauaagguuaauuaugaaauaccuaaaaaacugucagaugucauucaauauuaauauuuuuuaguaauaugaaaaauuguucuaaauuacauuugaaaucuguacuuauucuauuaaaauacagaaauaaaucaugaauuuuccauuuacacuuacaaaggagauuucaccucuuuauucuaaaaauuuauaacagaagacuuaauuguccuaauuuaugaaaauacaugucacuagauacgggguaguaaccucauagaaucugcaguuuuggcuuacagcuuucucuuuucauaaaaaccagcauuuaaauauuugguuacauagaggagaccuugcuccuuucaaaagagguaagacaaugaaacuuuccuaacaagagaagacuucaaagagagaggccuuuucaagaugauuaugguuaugcauuuggacaaaauaaaauuaagaagagaacuaagaaaccauagcuaggaagaaaaaguaacaaagugcauguuagcaaacuucaaaucugaaggaauuuuaaaaaauauuggaaauaaguagaguagugggcaauagaaaacuggaagaagaaugauucuuuggaagacaagaaaaauacauuaaaaguggaauucaauuagauaagcaauccuaaagaagacaggaaaaaaauaauccaaaagaacaugaaauggaagugagagaucaugggggaaaaaaaagauuguaagaaaaugaaguggaaauuuugaguggaaagaaauaguaaaguaauagcaauaacaugaccaauaucaaauaacguggacaaaagaauuauaaggaaaaauuuguuagaauauacaaauaauaaauaaagauauaauaucaucugguaauaucuaacugaaagaaaaagagggagguaaaucuguagcauuauaauuaacagauuaccuucucgggagacuuuacaagaucagaaaguuaauacugauaauauucagugucauuucuaagacuuuacuaauucauuacuuaucauaaauguucuaguacuagaugagguuuuugcuucugggcauuauauaucucuguuucccguagaagaggacacauguauuacguucuggacuugaggaggcauuuaucacagccaaaagauguuuauacuugaggugacugggagugguaaaccauauggcuuuggugacccucaaagugcagauggaggagcuuuauuuaaaguaauccuaacccaugaagccuuacaguuaaacucccuugggcaucugcuuuucuccagucaaacaaauauguacgauagcucacaaugaaguauuucauuuucccuguggcauuucacacagaagucuuaacuguaaaggcaaccuuauaaaugcuuuguacccgaagaaacuggccuuuuauaaguaaaucauuauguaguuucuuccuuuggagggcagcucugugugacugcuugggccucugugguuagaucuguuugguuaacgggcuuuugggcuuucacacaaagcuauacucuccacaaacuucugugagauaaaaaggugauaucugucuuaguccucugaauauuuuuucuuuguucagaaccugagaaagaugaaugaaauuuaguguuucccauccccgagagacacccagcauccacaacuucacacucugaugccauuguguauuuaugcaagaaauaccauaacuaagguaaugucuugagauuuuuugguucaauaauguccuuaaauucuauguuguuuuuaaagccuaaaagaaauucccccuccucacucccccgucucucccuacaaccuggugagacaauucucucauuuucuccucccaguuuccaaugcuauuguuaugaucuauuagaauaauugcuauuauuuuuuugccuuaucugacccuagaagugauuuacagggaaaaaaauuacuaaccaauugauuagugaacugaauauaaagugcagcucuuaugguuuauucacagacaagaauauauauaguacuuaaugugauaguauuuuguuguugauguggaacaguguuagucuauaauacaggcuuucaggcagacaagaccuaguuuaccuugaccucuggacuucugaaagguugaguaaguuauuuuaagagaauuagacaaagauaaguaaaucaaaaccaauaaauggcaaagauuuaaaaaacagagauuagucuauuccucucauuuaauagaaaacaaacugaaucaaagaaaaaugggcaauuucuuuguuuagaacuuaugugcuuccuacuuucaaaauaaauaugucauuugucccagguuacgcagcuuauuaauggugggacuuaaaucagaacuuuuauuuucuaacucccaaaccagugucugccagguccuaauaguuaugaaauauucuuuuaaagcuaaauaaaauauaugaaaauauaaguagcuguguuaaaauaguauuuaucuacucuaauugaucuaggucucuccaaggaauuuauauuacuuggacagacccaaaacaaauacaguaaauaaagcauucuggcaaaaauggagacuucaaaauuuugaaaaaugggagacuccaaaauuuaaaaagaugauuguaauauucaaguuuagaaucauaugaugcagguuuuaauccugcugaacuauaccuccaccgucaauuuauguuuuacuuccguuauguuuuauguauugcuaaacuggauuauuucuaguuacuaacugagcagaugacuuuauauaauuuaucuguaacuccaaaguucaauauaguugugcaacauuuauauaucuucaccaccuuauaauauauaaucugauguggagaaaaauuauauaucuucaauucugucuauaaaguaguuuaauauccauacugaagagaaaccaaaaagacuucugccaaaaugcuugccaucuccuuguaaagagcuauuacuauucuggggacauaaaccaucugggcacgacaauuugugaaguguuucaguucguuuuguaguguucuugccaccuacuuuacaaaagaauguuacugccaauaauaauaaaaauaacuagguaaaauguuauucuuacuguugugaucucacauaacuauuuuuuagcagccaagaaagaaauugguuuuuacauagaaaucccaaaccuagaaaguauuguuuuauaaauuucuuuucuagaaauaauuugauuugguguaauuauaauuacaaaaauauuucauuugauuucucaauaagccaauuuuuaguagguugggguuaacuaaaacaacauauuucagccauauguuuaaaacuuuuacauuuaaaaauaacuucauuaucuacccuuaguuuuucaugccuuaugcaaacugcaguuaaaauaaggucagauaucuaacauaugucuguaucuacauuuguauacuccagggguguuuuucaagacacccuaauaauaaacuaagaaguaaaaaauucauucaaucuacauacaauacauagaaauacaauacauaguuuuugccugagauucagaucucaggcaaaaaauucauucaaucuacauacaauacauagaaauacaguacauaguuuuugccugagauucagaucugccauaguuuauuaggcucugccuguaguuuucucaugaaacacaucaguaucauuaggaugauuaauuucauuuuuuuccuuacagagaagauugucauuaaagaguaagaccauggauaguucacauaauaaaucaugugaaauuuaggaucucuucuagacgaucauagucagaauaauuuaagggaauuccuuugaacaaaugucauuaguuuauaucaagaauauaguaaugacugucauuguaaguaaauuauuuaaguuaaccucuuuuaguaaaguuuuccuguuagaaaauaaguaaucuuauugugugggugaguggucacucgacagagauuugggaggauguagagagugaagucuaauccucgugacugugauugugguugcagauuuugagauaccaagugugaggugauaggcacuuaaagcccagugugggccucccagggcuguuuagcuagcaaugagagaggcacugccuauauccaaguuguauauggcagguuuugcacaaaguggauuacucgaagagaaagccuaauggccagucuauucaucuuccccuuucucgauguucaucuuuucucucccagcucuccuuuauucucaauuuucuuuuuuuuuuuuuuuuugcucagccuccaucucacuuccguugcuguccucuccccaccccuucccacucuggacugugccucuccuuuguagacacuucaaguccauucuauuucauucaaaaaccauggucuagaaguaacuuaauguaaacccacaaagauggagacagaaugaaugccauucuucuugcugcucucucagacaaugcaggucauuuuugccuauggugcugguaaagccaggaguuauguagcuauaaguagcagccagaggaaauagugccugagucagcaauugucuuuuuauugcuguggggcaauaaugggagaaaaaaucaggcuugguacaauucccuuugaaggaaaaagaugccaacacuagcauuuuaacacaaaaugcugguuggggguugggaggaaggaugcuuacauuccuucuuuggaaauaucuacuuugauaaccauuuugguaaaauaaugcaguguuuucagugugcaaauccuuucaggacucaugguuguauggcagacgcaccugacagcaauaauuuaaggguacccugagaaugacucuguggucuaaaaagaauguguguuuggaagucugagguaagaaaucuggcuggaaguggccaaccuggaaauuugcuccuuauuauuaaggauuuccaaagccugguccauuccucagaaugugggccauacaguggaugaagcccuuuguuuggauuaaaugaauguugcuagguggagagugcuaagugaaaaugcuauauaaacugcaugcuuuuuacaaacauuagugguucucccauccagcccacugccacuggaccaccccuguauaugaguccuagauaaauccuaugucucccuugcuggcuucaagucucuucuuuagucucuuggccaugaugccaucccuauuggacucaaugguguuccagcacaacaaugguaugauuagacucuguuccugggagacauacaauacccuccuuugguaggaucuauguggaauguuuagucauuaguguuauuaagaaaucauaguuauuuaauuuauguuuuaagacuuucaccuuucauucucugaauguuaguuagcucagggugugaaaugguucaacagaaauacuugagcugcugcagccagaaggauguuuaugguguuaugcaggaaauauccugcagaauucuguguggaauucugcucagagggguuucucuuuagcauaaacucaauuuaaaaauacucuucugcucaaaagcauucuuaugaaaccaccucaacacaaagcaaaacuguccaggcauaguugcuguauggagagauacagcauagaacccacgggcagcggggcugaagcagagaaaaacugcaggggaaagagaaacagauccaggaacggggagaggagaguguugagcacaaauuaacuacccuggggaaugaguaucagguguuugacacuuucacuuuuccaaauaaccugaagacaaauggaaccucccugaguuaugaaaaauugagacuagaaguaucagagcugcagaauucauuugguucagauucuguauauauaaaaucuagacauagaacaagucuaagcaaaggcauauuaucugcaaugguuacuauggauuauuguucagagaagaaccauuuugguauagagaaagcugaaagaacuuacagaaaauaggucuugaaagaugaaaggcagagauaauuuccugauucagaaacucaguauauuaaauuuucuguauguuauuuaucauuuaugauauaaaauuaugcuuaauuuaucauguaaacugaaaauaaaauucuaagcccccugacugaauugaccuucuccuggccaaaaggaucccagaguaaccuugaagacugaauucucagccaugguggaucagggagucagacauaccuccuuauaaccccucccucacuaaccacuaugaggcuuucuucccuaagggcuaaacagaaaucagcccuuucaaaagacucccccacugacauggaccaaccaccugacacuuucccuccauuggugccucauaagagaccacccacuagggaaugauucuagccauuccacugagaaugugcaguaaggauuuuuguguccucugcuucaccuuuuaaugucagagggccgaaaacucuacccucggaucaugcuaaugucgccauuuuuuccacauggaucccacaaaggggcaugaagcucaguugaggaugugcaugcuucuccucucauaaauauucaugacuccuccuauaacuuauugaacauauauauuuggccaccgugcuuagcauaaauuucuguuuccuuuuucccucccuugaagugucuguuucuggcuucuggcuggaaguuaugcuucccaaccugucagaaggucacucugcaggcugcagcccuuuauaagaaauaaagcucuccuuuccaaauuuaugaaccucaucauucuucaggugauaaucauauaaacgucuacuuaaguuugcuuucagucugucaugugaauucagucauucucacuauauuccuuuugugguauacuggucuggguuaaagagacccucuagggauuauuauacaguuucgucuuguuugagagcucagcagcugaugauuaucacagauuuguauagaguggacacuaccagauguccagcacaucugucacagcagaugugacauugagccaagucuauuucugucuagguguaugauacuuggugcuauacuuuggauaugguuugucgccaucaaaucucauguugaaauuugauuccuaauguuggagguggggccuaaugggaaguguuugggucauggguggaucccucaugaaugguuuuugccucauucucacuguaacgagugaguccuugcucuguuaguucucaugagaacugguugaaaaaaaaaaaaaaagagcagccuggcacgguggcucacaccuguaaucccaggacuuugggaggcugagguggguggaucaccugagguugggaguuugagaccaggcuaaccaacguggagaaacccugucucuacuaaaaacacaaaauuagcugggcaugguggugcaugccuauaaucccagcuacuugggaggaugaggcaggagaaucgcuugaaccugggaagcugggagggagagguugcggugagccaagagcaugccauugcacucuagccugggcaacaagagcaaaacuccaucucagaaaaaaagccuggcaccccacccugucucuuguuuccucucuggccauguggucucuaccccacacaggcugcccuugccuucugucaugaggggaagucaccugaggcccucaauagaagcugauucuggugccaugcuucuuguacagucugaagaaccauaagucaaguaaaccucuuuuuaaaaaaaaaaauuacccagccucagauauucuuuuauagcaauacuaaauggacuaagaaacauggucuauacagucaauuuuguucauuucuuuaauauuuauugaauauagacaaugugcaaggcacugguuagagauguggagacuaugaaguuggcaaauagagaauaauaauauugagaauccugcaaaguaaccaaauugauuuuagaagcuccuuuaugaaauagacuuuaggcuuuagucuucuuggaucuuuacuuggaaauuuagguauuccugauuuuaacagauucauuuuuuuaagucccagaguagaagaaaauggagguugaacacugaaacauugacuuugaaaacugaacaucucugucaaucccacaaucuguguguuuguguguguguguguguguguguguguguaaggguaugagcuacaacacaaucuugaauugucacuaaaccauuuuuaaaauaauuggucaaccacccaucacaucacuuguauucacaaucccauaaaguuaucagaccagagugauuuuucucuaaucuagauguacauuaaaaugugcaucucauuuaaagauaguuuugguacaucaaagugaauguugauaaacauguaagacaauggaauauaaaguucaaugcauguccugcauucucuccaucuaaccauuuuuguggugccaaugccuauuuucaggugucaaugaugaagaacuggaaaaagauauaguuaaaacaaaaauugcuaaagaaaaaaaugcaugcuuuuuuggauucauuucuacucuuucauaucaauauguuuucuaacauuucuuaagugcugagaaaauuuuccuuuuuguuauccucaauagcagguggcagcugaaauuguucaauuauaugcuuuguuaaaaccuuauaaauaauuuaaauacuauuauuacagucagcuaaagccuaugcucaaauuauauuuucuuuuguuuaaauucccaaauauaucucaccugcuacccuacauucacccccaguaaagucccaaagcccgugggcuagguagggcauuauuguuuuagaauguuaccaaguuggccuagaagaguacuugauuuguugcgacaacuguuguuguucucuagguagaguguugcguaaaggaaacagugauguccaaaggggcuggacuggcagauuggaaguagggagacccaaggucagcauuaugacauggaggauaugaguaaccaccauaaugauuuaagauaucugaacaggguugccagaaaaaauacaugccacacaguuaaauuugaauuucagauaacugauuucuuaaagcauaagcauaccucauacaauuuguuuuauauuuacuauacuuuaaguucugggauacacgugcagaacuugcagguuuguuacauagguauacacgugccuuggugguuugcugcacccaucaaccugucaucuacauugaguauuucuccuaucccuccccuaggcccccaccccucgauaggccccagugugugauauucccuucccuguguccauguguucucauugucuauauuuggggcccacugcuaguaaacauuauucauuguuuaucugaaagucaaauauaacuggacaguuuguauguuuaguuuccaaauguagcagcccuauauaugaagaaagucuucucugcuaaaaaaauuauuuuccugcuuccugaaauucaauuaauuagcauuuucaguucaguuagcaagcgcuuccuuuuaaaagacaaguaucucugggaguacaugagucguuuaugcaucaaugagacuacuuacuucucaauguaaaaugcauuucucacugucaaaguggguuaaucaaucagagagagggcguaagaguucuuuuuuugguugacuagguaggggauggggcuggcugggaccuguuaauuucaguggaagaauacauauggaugaauuacuuuuaguggggauuuucugauggaaugaauuaucaaugugccaggaagagacuauauaaaaagauggaauggggguagagaguguaaggugguacugacagaaaaaacucacucauucuaggauuuuucuugaacaauuaaauacucaugagaggaaccaguguuggguuuuauuuuucaaacauggaugaugguaaauguuaaaaccaguggcaagcauauuuucacauuucuuucauuauuaaaaguauugauguaagauuauccucaaauauaugaguagugcaucuuugcacauuaaggacuccuccuuuauuuuaucacuucgcuuuaacuccguagguccuauacaaaccaaagaaauuaucuuccuuccuuccuuccuucuuuccuuuuuuuuuuuuuuuuuuuuuuuuuuuugauauaggguauugcccugucacacaggcuggagugcagugaugagaucauggcucacuguagccucaaacuucuggccccgagugauacucacaccucaggcuccugaguagcugggaugcauaccagcaugcccagcugauuuuuaaacuuucguacaggcaguaucucucuauguugcccagguggucuugaacuccuggccucaagugauccucuugccucagccucccaaauugcugggaugacaggcaugagccauuguauccagcaagaaagagaaaagaauuuaaacuucuaaagaugaaacugcuacacguggacagccauaacaacaaagagaagaguacucuuaagcauuugugaaagucagaaaccuauaaacuuuugggaaacaaaauaaguauauuuucccuuuaaucuuacaagugaugcaauacacuucuagcaaaagugaaagggcaaauaggaauuuugcaacauugagcucucuuuaagcagaagccaggccauagguucuucacuagucaccagggucuacagccuuuauugucuuuaccagucacuagguaugagacauuuucucauaaaauguaacuacuauacauucgccacaaacuuuaaacccccuuuucaccucccaugguacccagaagagugauagguacuuaauagguccucaaaaauuuucagcuaaugaauaauuguuaauuaaaacuuauacuagaagcaaacucuuaaaacauauucuaaguacuaaagucuaauauuuuauaucuauugguuuauucauauucuuguuuguuaauccuaaucaaauagugcaaaguuuaaauuucauuuuccuaagauuuguuuuaaaauaacacgauuuacccaagugauuucaaaccacaauuacauucuguuuaaauuacuaauauuuuauugcaucacaaucugcaugaaacagaugucaggauauaaugaacuaaccugcauuguauuuuuauuuuugucuccuguggcauaacgauuucauaggaaagagaacuacacagcugacugacugauggggaaaguuacacaauggauagcuuugcagcaacauacuaaugcgguagggagaugcugcagagaggcuagaaauaaaaucauuucuuuccggagcagcacugcuugcugucggcugagacaaaaaagagauuuccuuuuuuuccuuucuuuuuuuugaaaacucacauaacauuaauucuguuaagcacuggauacacggaaagguguuuaccuuagaaaaucauuuagcaauuuuuagaaacuagacauauagcaauuuuaaaucuuuuuaacuaucuaaugaccaaagcagaggguccucacaagagggauuuagaugcuacugaauugaauaaagaaaauauggauacauuuauuguaugccuuauucaguuugagguucauuuugaguuuagaaauagggauauaaaaacaucagggguuaaauagcauggguaaaggacaugaaccaagcugcagagaagaggcugacugccugcuauauuugcaggcauuacucagcacuuuucuuaaaccgauacaucuugcuggcugcauaagcaagacaagacccuuuucccuauggcucaggaaggcagagaagucaacuucagccuugaaaaaggcaaauacuuuagugcaauaaugaaaucaacuaaacgucuugugcuuaauguuucuuuccccacgccacuagaauuguaugcauaaucauucuaugcaacauauugaagaaaccaaaauguuugccacagugugcucaguaauuuuuuuuugaaugaaugaauaacugaauucaugaucaaugccuuauccuaggucaccugcucagugcacgggcuauaggaagggcaaaugucacuguccuucccacccaucucauucuaacacaaguguuaucaucaaacuaaggaaacuaaaacauguagccauaaaacaacuguuuagagcuucauucagauaauauuuuuuucuuuaaaauccaagaauguaauaccaaauuuuaauuaagcgaaggcgucuuuguggagaacuuaaauaauauggcauauugcuuucuguuuaucuaguagagacuacacuuugaaaauauagaccauugcauucauaaaaaucauguggagaucuuuuugaaaacacauaguccaaggucccaccucaagauuuuguuucagagaucuaagguggaccuagaaucuguguuuaaacugcuuguccaggugaucaggauguagcacucauaguuaaugaaugggcaaauuuugagaaacacuguuuuagagaauggucuaggaaaagcauccauuacaaauauaaaaaagcaagcuuuugguaccuaagggacugagucgauucaugcagguauugguuuguugauuaaagaugcauccauaauucaauuaauuuaaauguuagaacaggucauaucuuuuggguuuauuuuuaauuguuucguacagaugaggucucgcuauguugccuaggcuagucuugaacuccuggccucaagugauccuucugccucagcaucgggagucacugggauuaaaggcaugagccaccaugcucagguaggaaaaaaucauuucuuacauggagauuuauuuucucaaccagguaaguuuugugauaagaucauuaaacuuagaauaagaauagucagguucaaaauuugguuguaguccuuaacaaaacugugauauuaaaauaguaccuuggccuugcuuagcuucaauucuaucauuuauaaaaugggaauaauuuuuauaauaacacaugauaggugccaacucagcccucacuccuuuuuugaaauuguccuccauguaacccauacugaaaguauaaacuauguuuauaccaugugacucuuucaccccuuucccauggccacagcuugguagguuuuaugaggacgcugaucacggggcacucaucuauaggcuuaacugaaacaauagaauuugcuuucugggugauguuuaaaugaaguaagagugagugagucagaauguuaugagaagaugcacugcaugaccuagaguugaggaugaggaagcuaugucuggccaugaccaagcagaggauaucggccaaagcagaaaaaaaaaacagaaauaacaguagccaugcaagcauucagaaagaauguaggcuguguugauauguuucuggacuucucauuccaguuuaaucucuuuauggcuuacuuggguuuuggccuaugggauuuucaguugaauucuucuuuuuuuuuuuccuuugagauggagucucacucugucgcccaggcuggagugcaguggcgugaucugggcucacugcaagcuccaccucccagguucacgccauucuccugccucaaccuccugaguagcugggacuacaguugccugccaccacgcccagcuaauuuuuuuauuuuuauuuuuagcagagaugggguuucaccguguuagcuaggauggucucaaccuccugaccucacgauccacccgccucggccucccaaagugcugggauuacaggcgugagccaccaugcauggccugaauucuuauaauaaauaaaccauuuuacuuauacccgcuuaaaugugccuuuauguuuugaauacaaguguucugacaaaagcacaauguaaaaacacugaacauaacauguucuuaacuuuuguuuuaaaacaaaagaaaaaaauggagguucagcaaaguuaaauagcacaaguuaauaaagugaugaccauugucagacaguuuggaggaaguuugagauuuaaauccgggucuaaucuuucacaguucaaugcucuuguuuuaaaaccagaaauucaggcagcaagacugauauuucauuagaaacacuuaugaccccaauauguuuucacauugagaaacugagucauuccacuuuuucaugaaaauagcuaaaagaauccuuaucggucaaaucuuucacacacacacacacacaaaaaugaucuuuaacauuauuucaaguacuuggacaaauaccaaguugggauaccagagaucuauguuaugaaggauggauaaaacaucugauaagaaaaaaagaaagccauuauuauuacaccuuaaauauuaaaugagaaaacaaggaaugacccuuggagaacgacuaauuuugagaauuguauacugauagacguguuggaauggacuacuugcaaacagaaucacugagccacuuaaugaguugagugguugaaaguguccuuuuaaaugaucaauuuagaccccagagaauaucugccagacagaacaaguuuuaguguaguugauaguaaguugugcccagaauauuaaauugagucaaauuuauuuuccacauaaagucacaguuuuauaugucauuauauaaucucuuggcagaaauaaggaauaacauucugaauguugcacuccaaaauucaaagaaucuuaguauaaaaauaucuagcauuuuagauguuucaaaguagggccaaaugcagaaaauaaguuggauaugauaaaaauaccagaaaguucuauucaguuggcaucuuacuagcaguuucaucuucuaauaauuuaguugcuacgcauggaguagaauagaauuuaacaacaacaaaagaucauuaaauaccaaucaaccaaacaaccaaacaccaaaggaccuauuaaacuucaacgaugcucaguuauacucuugaggguacagggcuaucagagaugggcagugugcuccuuuccuguguagucuaugggaucuaucuauguaacccuccaugugcuccuacccuuccccuucagcuguuaaaaacacaaugccaaaaucaggaucaaacaaaaauugcaguuacacuucugaauuuggcaacaucuauuucaccacuccuuuuagaucauuuggucuuuauuauucugcuuuauauuguauuugauuuuguaagucagaucaaauaauuuuuggaaauagaaaacaaacaaauaagcuccccauugcuacaguuuauacccauuuuaaaugauuuaucuuuccauagggauaaaaauucaauuacguacccuccuugugacaaaccuccauacaauugaaggcaguuauuaugucucucuuuaguuuucucuuuuccaagcugaaaaauuuucaauauuuuaacccauagguaugauauaauuauuuguauuccucuuuugcucccuucuaauuucugcccaacuucacuaaucuccuuaggguagaaacuguaauagaauaauggugauaagaacaguaaaaagaugaugucugauuuuuguauacauuucccuuaguacgaauuacugugucaaguuuuuuaguaauauaauaccuuuauuuagccuuugucauuguacaagccaguuugacauuuuaacaaagggggauugaaacaauaaaacugaucuuuaaauauaaaaauaucccaugaucccaugauucuccuguucuuccugcuaucaaucagaaacaacgaugccuguuaaauaaaagagccuuauugguucuaccaaauuugugacuaauuagcuucucugccauccuguuauuuguauaguuuguucuugguucaaaauauacuacacgcuaaccaaacuugacacuagagucucacuugccuugaugggccaauuccuaaagguuucaagguuauucuguuuccuauuuauacauuccucagagcuauuaauaucaguuucacuuaaaauuuauauuuaaugucaauacccagcaugaaaaacuauuaaaugguaauagucuuuagauuaauuuagauaaaugguaauuaauauauuuuuccaggaugucauaaaaucaucauuacuuaccuugaaccacuugaacccuccccuaaaagcaauaugauacagaugaauaauugcagaaaauuaggcccagauuuauucuaaaguuuucaagaauucauaaugucccacuccaguuuuggauucauguuaaauacaugucuuacaaacauucacacuauauucuuuuuaaauuauacaaauguaaguauuuaauaaaaugcaaauucucucaaagaguuauugacuccacagaagacuuuugagagucaaugucuauuguuacuaucaacugacacugaaaguucaauuucuuucauucauaugguaguccauaauucugauaugaaaguuggaaaucagggaugaaaaaucacuuuuuuuuuugguuguuguuacagagucucgcucugucgcccaggcuggagugcaguggugugaauucggcucacugcaagcuccgccucccugguucaaacaauucucugcuucagcuucccgaguagcugggauuacaggcacccaccaccacacccagcuaauuuuuguauuuuuaguagagacaggguuucaccauguuggccaggcuggucuugaacuccugaccucgugauccacccaccucggccucccaaagugcugggauuacaggcgugagccacugcgcccagccugagagaucauguuuuuuauaagaacauauacauguauagauaugcaaauaccuucuuaaagcacagauaagugguauccauuauuuuuuucuugaucaacaugacauuuugcuucaacucaaaagaaaauuacauugaucugacaauuucuuuucacaaggucauaguaauuuuauucuaugcuauucuaggugacuauuaauuuuaauauaugugugacuuuuuguuguuuuuguuuuguuuuuauugaaauuugaagauacugaguuaagaugaaaguccuaaaguucuucaaucacuuuucugaaaucuagaccuccaaauuugcccuuucauaaaguuuaccacuagacuuaacaaaacacucuaaguguucaccauuagugauguaaaucuaaaauacuauauacuucuuucuucuuuguguguguuuuuuuuguuuuuguuuuuguguuuuuggagacggggucaggcucuguugcccgggcuguagugcaguggcaugaucgcggcucacugcaaccuaacucucccagguucaagcaauucuccuggcuuagccucccaaguagcugggacuacaggugcaugccaccacaccuggcuaauuuuuuguauuuuaguagacacaggguuccaccaugucacccaggcuggucuugaacucgugagcucaagcaaucugcccgccuuggccuuccaauguuuucuuuuuuaacaauuuacaaauguacagugauuacacuucguuucuauuuuugaaacuuuuuucaccuuccuuccuagaaggggaaaccuauuaauaguucuagaaaucucaaugccuaccucauccuuuagucuuuauuaauuuguuuuuucuaaaugccaggguuugaaaaucagauaaacaccaucucuagagaucugcuauauguuuaaaaaaaugcuuauacgugagauuaucuagacuucacuuugaaauaagagauauaaaauuauauuugguauguucaaagguacuuguauucaauuaaaaaaaaauagggucuugcccugucacccaggcuggcgugcaguggcaugaucauagcucacugcagccuugaacuacugggcucaagugaucccuuccucagccuccucaguagcuuggaguacagauguguaucaccugaccagcuaauuuuuaaaaauauuuuguagggacagggucucacuuugcugccuagguggaucuugaacuacuagcuucaagcaauccuuccaccuuggucucccaaauuucugggauuacaggcaugagcuaucacaccuagccucuauuugaaguuguauucuagagucuuguagaauuagaaaacuuuuaucuagauaaauagaggucauuguagaaauauuuguaugcaaucugccuuguuuggaugaaguuuucuucucuugcauuuguaacaauucacaagaaauaucuaucugucuaucaaaaucuggcagagacacaaugaaaaaagaaaacuuuaagcuaacaucccugaugaauauagacacaaaaauccucaacaaaauacuagcaaauugaacccagcagcacauccaaaaagcuaauccaccaugaucaaguaggcuuuauuccuaggaugcaagguugguucaacauauacauaucaauagaugugauucaucacauaaacagaacuaaaaacaaaaaaccacaugaucaucuuaauuaagaugcggaaaaggcuuucaauaaaauucaacaucucuucauguuaaaaacccucaacaaauuaggccaaagcauaagagccaucuauaaccaacucacagccaacaucauacugaggaggcaaaagaugaaagcauucucccuaagaacugaaacgaaacaagggugcucacucuuaccacuccuacucaacauaaugcuggaaguccuagccagagcaaccaggcaggagaaagaaauaaaaggcauccaaauacgaagagaggaagucaaacuaucucucuuugaaaaugauaugauuuuauaccuagaaaacaaaaccccacagucucuucccaaaggcuccuagaucaaauaaacaacuucaggaaaguuucaggaugaaaaauuaauguacaaaaaucaguagcauuuccauacaccaauaacauccaagcugagagccaagucaauaaugcaaucucauucacgauagccacgaaaaguauaaaauaccuaguaacacagcuaaccagggagaugaaagaucucuacaacaagaauuaugaaacacugaugaaagaaaucagagauggcacacacaaauagaaaaacauuccaugcucauggguaggaagaauuaauauuguuaaaaugacuaugccacccaaagcaauuuacagauucaaugcuauuucuaucaaacuaccaaugucauuuuucacagaauuagaaaaacuauuugaaaauucauauaaaacccaaaaagauccugacuagccaaagcaauccuaaacaaaaagaacaaugucugaggcaucacaccacccaacuauaauacaagucuacaguaaccaaaacagcauaguacuggcacaaaaacagcuuauccaccacaaucaagugggcuucaucccugggaugcaaggcugguucaauauacgcaaaucaauaaauguaauccagcauauaaacagagccaaagacaaaaaccacaugauuaucucaauagaugcagaaaaagccuuugacaaaauucaacaacccuucaugcuaaaaacucucaauaaauuagguauugaugggacguaucucaaaauaauaagagcuaucuaugacaaacccacagccaauaucauacugaaugggcaaaaacuggaagcauucccuuugaaaacgggcacaaggcagggaugcccucucucaccacuccuauucaacauaguguuggaaguucuggccagggcaauuaggcaggagaaggaaauaaaggguauucaauuaggaaaagaggaagucaaauugucccuguuugcagacgacaugauuguauaucuagaaaaccccauugucucagcccaaaaucuccuuaagcugauaagcaacuucagcaaagucucaggauacaaaaucaauguacaaaaaucacaagcauucuuauacaccaacaacagacaaacagagagccaaaucaugagugaacucccauucacaauugcuucaaagagaauaaaauaccuaggaauccaacuuacaagggaugugaaggaccucuucaaggagaacuacaaaccacugcucaaggaaauaaaagaggauacaaacaaauggaagaacauuccaugcucaugggugggaagaaucaauaucgugaaaauggccauacugcccaagguaauuuacagauucaaugccauccccaucaagcuaccaaugccuuucuucacagaauuggaaaaaacuacuuuaaaguucauauggaaccaaaaaagagcccgcaucgccaaggcaauccuaagccaaaagaacaaagcuggaggcaucacacuaccugacuucaaacuauacuacaaggcuacaguaacccaaacagcaugguacugguaccaaaacagagauauagaucaauggaacagaacagagcccucagaaauaacgccacauaucuacaaccaucugaucuuugacaaaccugagaaaaacaagcaauggggaaaggauucccuauuuaauaaauggugcugggaaaacuggcuagccauauguagaaagcugaaacuggaucccuuccuuacaccuuauacaaaaaucaauucaagauggauuaaagauuuaaacguuagaccuaaaaccauaaaaacccuagaagaaaaccuaggcauuaccauucaggacauaggcaugggcaaggaccucauguccaaaacaccaaaagcaauggcaacaaaagacaaaauugacaaaugggaucuaauuaaacuaaagagcuucugcacagcaaaagaacuaccaucagagugaacaggcaaccuacaaaaugggagaaaauuuucacaaccuacucaucugacaaagggcuaauauccagaaucuacaaugaacucaaacaaauuuacaagaaaaaaacaaccccaucaaaaagugggcaaaggacaugaacagacacuucucaaaagaagacauuuaugcagccaaaaaacacaugaaaaaaugcucaucaucacuggccaucagagaaaugcaaaucaaaaccacaaugagauaccaucucacaccaguuagaauggcaaucauuaaaaagucaggaaacaacaggugcuggagaggauguggagaaauaggaacacuuuuacacuguuggugggacuguaaacuaguucaaccauuguggaagucaguguggcgauuccucagggaucuagaacuagaaauaccauuugacccagccaucccauuacuggguauauacccaaaggacuauaaaucaugcugcuauaaagacacaugcacacguauguuuauugcggcauuauucacaauagcaaagacuuggaaccaacccaaauguccaacaaugauagacuggauuaagaaaauguggcacauauacacuauggaauacuaugcagccauaaaaaaugaugaguucauguccuuuguagggacauggaugcaauuggaaaucaucauucucuguaaacuaucgcaagaacaaaaaaccaaacaccgcauauucucacucauaggugggaauugaacaaugagaucacauggacacaggaaggggaauaucacacucuggggacuguggugggguggggggaggggggagggauagcauugggagauauaccuaaugcuggaugacgaguuagugggugcagcgcaccagcauggcacauguauacauauguaacuaaccugcacaaugugcacauguacccuaaaacuuaaaguauaauuaaaaaaaaaaaaaaacagacacauagaccaaugaaacagaagagagaacccagaaauaaagucacacacauacgacguucugaucuugaacacaaucgauaauagcaagcaaggcagaaaagacucccuguuaaauaaacugugcugggauaacuggcuaaccauacgcagaagauugaaacuggaccccuuccuuucaccauauacaaaaaucaguucaagauggauuaaagacuuaaauguaagaccuaaaacucuaaacccuagaagaaaacuaagaaauaccucgauuaaggccuuggcaaagauuucaugacaaagucuccaaaagcaauugcaacaaaaccaaaaauagacaagugggaccuaauuaaaauaaagagcaucugcacaacaaaaacaaaacuaucaauagaguaaacagacaaccagcagaaugggagaaaauauuugcaaaccaugcauaugaugaaggucuaauauccaguaucuauaaggaacuuacauaaaucaacaagugaaaaacaaccccauuuaaaaaugggcaaagaauuaaaaagacaguucucaaaagaauacauacacgugaccaacaagcauaugaaaaaaugcucaacaucaugaaucauuagagaaaugaaaaucaaaaccacaaugagauaccaucucacaccagucagaaugacaauuuuuaaaaagucaugggcggggcgcggugacucgcgccugcaaucccagcacuuugggagguugaggcgggcggaucacgaggucaggauaucgagaccauccugacuaacacggugaaaccccauuucuacuaaaaauacaaaaaauuagccgggugugguggugggcgccuguagucccagcuacucaggaggcugaggcaggagaauggcgugaacccaggaggcggagcuuggagugagccgagaucgcuccacagcacuccauuccagccugggcgacagaguaagauuacaucucaaaaaaaaaaaaaagaaaaaaaagaaaaaaaaaaagucagaaaauaacagauguuggcaagguuguggggaaaagggaacacuuauacacugguggugagaauggauauuaguucagccacuguggaaggcaguuugaagauuucucagaauaaaugaaaacagaacuaccauuugacccagcaaucccaauacuggguauauauccaaaggacuauaaaucauucuaccaaaaagacacaugcacgcauauguucauugcagcacuauucacaauagcaauggcaugcaaucaaccuagauguccauuaauggcugacuggauaaagaaaaugugguacauauaugcuagggaacauuacacagccauaaauaagaacaaaagcauguccuuugaagcaacaugggugcuucagagaaaauaccauucaacaaaguuucaguaauauucgagcuauuuuguggauaaugcacaacuuuuguaccuuaaggcauuguucaauucuguuuaagaauaaauuguuuuugagcugccuauuagauuucaagccugacuuuagauuugggagauauauauauauauauaugacgguuucuguucuagaggagcagacagucuguuaggccagacacaguugaauagcaauauauuauaauauugaggaaguaggcugggcgcgguggcucacgccuguaaucccagcacuuugggaagccaaggagggcggaucaccugaggccaggagcucaagaccagucuggccaacauggcaaaaccuggucuuuacugaaaacacaaaauuuagccgggcaugguggcaggcaccuguggucccagcuacucgggagacugaggcaggagaaucacuugaacccgggagguggagguugcagugagccgaguucgcaccgcugcacuccagccugggugacaaagcaagacucugucuuaaauaaauaaauaaauaaauaaauaaauaaauaaauaaauaaauacugaggaaguauaacaauaaguuaucuuugagacacggaggaagcacagaagaggauauaaucacuucuuuugggauaugaggagggggaaaaauguuaagagaagcuuccuaaguaggugagagcugaaauggguuuuguaaaauaaaaggaaauucaccaggaagauaaagguaaaggacugaggacaugugaggcauguaaaauuaauaugaucuuuuagucacuuagaaaaaauaccauaaagaacacuaauaguguuuaaaagcaucuacccagugccaagaacugcauuauguauuggugaacauaacuuuagacuuuaccauacaacgugaaaauauauauuauuaucacuauuuuacagaugaagcaauaaaagucagaaaaaauguagcuaauuaaagugauacuguguauagcuagagcaguguauagcuagagcugauuugucugacucuagcccuaguuucuuuccauuauaucaauuuccuggaaauguaucucuguucauggcauagugccugacacuaugcuuauuaauaucuuuugaauaaaagaaccacugagugauuugaaauaaaacuaaauuuaguuaguuaauuuuauuggugguauauagagauaguaggaaaaauaauugaaaagagacauaaacagauuugccaauacuuucuaagaaaaauuauggaacuagaguuuagucaaaaugaaugcuuucauuguuagaauucaacuuuaaucuuugcagaauacaaacaaagacccauuuucuagaagaaguaacagggaagagagaguaagaaagagauaaugaugaacauugucuaauguuacagcauaaucuaguaagguaagaacagaagagaguucauugacuuaccaacauaguugucccuaaucaccucugugaaccuagagugcuacgauauaauaaugauuguggugguuuaaaaaguaaauggggcugggcaugguggcucacaucuguaaucccaucacuuuggaaggcugaggcagguguauugcuugagcucacaagcucgacaccagccugggcaacauggcaaaaccccgucucuacaaaaaauacaaaaauuaaccaggcaugguggugcguuuguguaguuccagcuacuuggaaggcugagguggggggauugcuugagccugggaaguggaggcugcaugagccaagguggcaccacugcacuccaaccugcgugacagagccagaucuugucucaaaaaaauaaaaaaauuaagguacauuuuauauaugagacuaugagaccgccaaaugauauuucucagccaacagccuucacagacauuugucuuagagccgauuuggcuacuuuguguugccaguaugcuguuguaagaaagcacaggaaugcuuguaaagaagaaaagaauugguaucaugguccugaaaaaaguuauuuccucaaggaauaaaaauagcaaaagaaaugacguaauuucucagcuucugauauguuucaaauaaccucagugaaguccuaggggaaauagcuuauaucauaugucuuacuccuuaggauuuuugcuauagaggaaaaagugugaaguuuucuuaauuuaauguuuuauacauauuugcuugcuguaccuggaccuuacaaaguggauacucuuuagaaagugaugaauauuuucacuuuuaaaagguuucagaguuuaaaaagguuaaaaagaaucauucauaaaaguuuaaaaacaacuucaucaaggguuucccuuuugccaaguuauaaguuuaaaaugagagaaugaauuugguuauuaacaggguuaccaccaggccugaauguaaauuaaaccuuugccaauagaagugaaacagaaagaaucaaccaacaauuuuaugaauuacagaccucauacacauuaaaacuucuacauauguaguuaugcuucagugaaacccuuuacauuguaguuaugcuucagugaaacccuuuauauuaaaauaaucaucacguauuugaccauaugaaaauaguuuacaucuaccacauuugguuuaucuuggccaaaaacaauuaauccuuagaaaaucuacuauaugaauaacucaauaauaaucaaagcauuugaauuagaaauaggaucaaacacacuuuuuugaaugaaugccuaauuuuuauuucucaguggaaaugcuagagcauauccaauauucacuagugaaaaaggcuauuuuccaugaagcccaugagaagaugacauaaguuaaacuuguccaauuccuuuucagggauagcaucaagaaauugucuuuaccccuauaaacugaagcauuugaaaaucaguaauauuaacugagcaaaauaacuuguggcaacagguaucagucugggacacaaucaagauacagaaaccgggccgggcgcgguggcucacgccuguaaucccagcacuuugggaggccgaggcggguggaucacgaggucaggagaucgagaccauccuggcuaacacggugaaaacccgucucuacuaaaaauacaaaaaaugagccgggcuggguggcaagugccuguagucccagcuacucaggaggcuaaggcaggagaauggcgugaaccuggaaagcggagcuugcagugagcccagauugcgccacugugcuccagccugggcgauagagcgagacuccgucucaaaacaaaaacaaaaacaaacaaaaaaagauacagaaaccacaugcuaauuuaaacagagaaaguuuaauauaugaagaauuauuaaguacugauaggagaguaaccauaaagauguaagagaaucuaaaggguauccuggagcuaagguagaggacucaaagaagagugaacuggaaggauuucccaucccaagguugggguccaaacuucauugggaaaagugugguggaagcccucuuucucuacagcagaauaguuugcugggguguccuggccggagcucugguccacaguugggcuacuguugggcaagcagaaacaauucuuuagggcacaggugagcuaagguuggugggugggccuucagaaggagugcggcacugaagugaggaugugucuguguuggcagugugcggugucagugcugggagaacuguggcaaaguggucacuaggcccuuauauagaggcugugaagucaccaacagacugccccaucugggcauguggcuggggaaaaacaccaccagaugucauuacacaagcacguugccaaugguccauugcuaaugguccacauugcuaaugaucgaaguaaaaucaaaauguagcauuagaaccaggaagagaagccccuuccuccugcagugacccuucacugcccucuacugacaaagaguaacguuaugcucacggucuaagaaaaaugcuuuaagugcccaauacacuauuucugguuagcuaccaaagagagcuaagaggcaauacacugguaacugucaugucuuguacaugaauaucauuauucauguuuuuuuaaaaucacagacuauacuucuuaacagcuacauacauuuuauuuauauucaucagaaacuuacugcuuauucuuugcccuuaacuacuuguauagaccaacauggaaccaaauuugcugucauauaggcuguugaucucuucauccacuagcacuuuucugaaacaaaaagcaaguaaucuucgaauucacauaagcauuuaucugcaacucugguguuacuugacgacugacuucuaccucccaguauauuugcuugugaauaugucuuguuuuuugcuuuaguccauaagcaccuugagagcagcauuuaccuuugcauucuucacuguaucgugcaaaguacuuuacccauaacagucacacaauaguugcugaauuaauuaauaaaauauuuggaauaacaacaccuaagagugagagguuacaaaacacgauaguucaaaauucaacaguuauaaaaaaaaaucaaaaguuaaaauacagaauauguuacaguauugaacauuguaugguaaauguaauuuacuggaaaguaugaauuuuauagugaucacauacuuuucuuaauauuuagauaucugacacauguaaaguagcaauaguucuuauucugaaccauucuugaauaaauaagaagagaacacaacuuggcuaacaauuuuuaucaauucagcuuugggugcuaacauaauuuaauugggaaagaauaaucauuucagcaacuaguacuagaaaaaccagauauccacaugcaaaaggaaggauuugaaacuguggauaacaauguacaaagauuaauucaaaauuaaucauaaauuuaaacguaagaacuaaaacuauaauucuuuaaaaauaugaguaaauauggugcacauacauaagguaauaauuucuuggcugcaacaccaaaugcauaaguggucaaaagagaacauugauaaauuguacuucauaaaaaaucauuugcccuucaaaagacaacaucaaaaaaugaagacaacccacagauugaaagaacguauuugcaaaucauauaucugauaagcgauuguaucuggcauauauauauauauuuuaaaacucuuacaagucaauaauaaaaaaccccaaagaaccuaacuauaaaaauaggcagaagauuuggguagauacuuguccaaagaagauaaaugacuaaucaacgagcacaucagaugcucaacaucauuaaucaugaaggaaaugcaaauaaaaaacccaaugagacaucacgucacacacacuggaaugacuauaauaauaauaaaaaaaacagauaaucacaaguguugggaaggauauagagaaacuggaacccucauauauuguuaguaggaauguaaaaugguacagccauuuggaaauacacuggcagugucuuacaauguuaaacauagauucauuauaugacccaguaauuucauuccuagguaucuaaucaagguaaaugaaaacauguauccauaugaagacuuauauggacauguucauagcagccuuauuaacaauagcccaaaaguggaaagcacccaaauguccauuagcugguaaauggauaaacaaaaugugguauauccauauaagggaguaugauuggucaauuaaaaugaaugaauacugaaacaugcuguuaggugagugaaucucaaagauauuauguuaagugaaagaagaaagucacaaaagaugacacauugcaugauucuauucauauaaaaugucuagaauaagcaaauguacagagacagcaaauagugauugccuaggacugggagugggaauagagagugacuacaagugggcaucaaguuucuuuuuagcucaauggaaauguucuaaaaugagauuguaaugauugcugcacaacucuauaaauauacaaaaaagcacugaacuaacaaggagcuaaaacuacaaugauaaucauguaagcagugauaauuauuugauucccuucuuuuucuguuugaaucagaaugccuugacaauuuuuuauucuuuucucuucuauaggauuucaaggaguuuagaacuuuacagaaauaauaacaaaaauuacagcauuugauuaauaaauacaucuuuuaguaauuuucuuuuugccuaaagucaagaauaauuguucaucuuaguauguuuauuaacuacucuugguguuauguugggcguuauaauaaagaaaaaucuuuguuucaaaauuuagguuggaauuuuggauccuacucugacuaacuagguacacuacugaauuuacaucaagauaacaguacagauagauaagaacauugauuuccuuaagaucaguaauuugaagcuuaaacauaguaugcaacacauugagagucucaaagaaguaacaagugccaucuuuagaaaauauuuuauauacuugguguggucuuaucauaagaaguauauacauacauaccuugacauauuguacuuugcuuuauugugcuucacagauacaguuuuucacaaauugaaaguuuguggcaacccuacauccagcaagucaauuuuggugccauuuuuccaacagcaugugcucacuucguguaucugugucacauuuugguaauucuugcaauauuucaaacuuuuucacuauuauuauaucuguuauggugaccugugaucaguaauauuuaaugucacuuuaguaauugcuuggggauggcaagaacugcacccaaauaagagugaacuuaauugguguuacgucugcucugacugcuccaccaacaugcuguucccgucucucuuccucuccuugggcuucccaguuccuugagacacaagaauauugaaauuauuccaaucaauaacccuacuaugugggugguggggaggugggaaugauuaauggguauaaaaauguaguuagauagaauaagauccagaaauguaguuaaauagaauaagaucuaguaacacaacaguuaucacagucaacaauaauuuauucuauauugaaaaauagcuaaaagaguauaauuggaauguuuguaacacaaaguaaugauaaaugcuugaggggacacauaccccauuuacucucaugugauuauugcauaugauacgccuguaucaaaacaucucauguaacccauaaagguauacaccuacuauguagccauacaaauaaaaaaaauuuuuuuuuaaucccuacaauggccuuuaaguguucaagucaaaggaagaauugaauguuucucacuuuaaauuaaaagcuagaaauaauuaagcuuugugaggaagacauguugaaaccuagauaggccaaaugcuaggccucaugaaccaaacaguuagccgaguugugaaugaaaaagaaauauucuuaaauauucuugaaggaaauuaaaagugcuacuccagugaacacaaaaaugauaagaaaguaaaauggcuuuauugcugauaugaagaaagucugaacaaaagauugaaccagccauaacauucccuugagccaaagccuaauucagagcaaggcucuaacucucuugaacucugugaaggcugagagagguaagaaagcuacagaagaaaaguuugaaguuagcagaguuugguuuaugagguuuaaggaaagaagcugccuccauaaaauuaaagugcaagguuaagcaguagguacugguguagaagcugcagcaaguuauccagaagaucuagcuaagaucauugauaugguuuggcuauguccccacccaaaucucaucuugaauuguagcucccauaauucccacaugucaugggaggaacccagugggagguaauugaaucaugggggcagguccuucucaugcugaucuugugguagugaauaagucucaggagaucugaugguuuuauaaaggggaguugcucuacacaaacuuucuuugccugccaccauguaaaacaucccuuugcuccuccuucaucuuccaccaugauuguuugaggccucccuagccauguggaacugugaguccguuaaacugcuuuccuuuauaaauuagccagucucggguaugucuuuauuaguagggugagaacagacuaauacaaucauugaugaaggugacuacacuaaacaacagauuuucaauauagaugaaacagccuuauauuaaaagaagaugccaucuaggacuuucauagcuagagaggagaagucaaugcuuggcuuuaaagcuucacagaauagguucagucucuuguuaggagcuaaugucaccagugacuuuaaguugaagccaauuuucauuuacuagucaaaaaaauccuagggcccuuaagaaguaugcuaaauauacucugccugugcucuauaaguagaacagcaaagccugaauggcagcacaucuguuuacagcaugcuuuauugaauguuuuaagccugcuauugagaccuacugcucagaaaaaaaaaaaagauuccauucaaaauauuaccgcugacugacaauguugcaaagagcucugauggagauguacaaggagauuaauguuauuuucaugccugauagcacaacacgcacucugcagcucauggauugaggaauaauuuuuauuuucaagucuuauuauuuaagacauacauuuuauaagacuauagcugcuauagagagugauuccucugauggaucugagcaaaguaaauugaaaaucaucuggauaaaauucaccauccuagaucccauuaagaacauuuguaauucaugggaggagguaaaaauauccauaugaacaggaguuuggaagaaaucgauuccaacuuucauggaugacuuugagggguacaagauucaguggaagaaguaacuguaaauguggcagaaauagcaagagaacuagaauuagaaugcagccugaagaugugacugaauugcugcaaugucaugauaaaaccuuaagagaggaggaguugcuucuuauagacgagcaaagaaagugauuucuugaaauagaaccuacuccuggugaagaugcugaggacauuguugaaaugacaaaaaaggauuuagauauuacauaaauuuauuugauaaagcaguggcagggcuugaaagcauugacuccaauuuugaaacaaguuauacuguggguaaaaugcuaucaaacagcaucacaugcuacagaggaaucuuuugugaaaggaagaucaaucaacguggcaaacuucauuguuguuuuauuguaagaaauugucacagucaucucaaccuucagcaacuaccacccugaucagucagcauccaucaacaucaaagcgagacucuccaccagcaaaaagauuauaugacucacugaaggcucagaugacuguuagcauuuuuuagcaauaaagcauuuuuaaauuaagguaugcacuuuuuuucaacauaauacuaucacauaccuaauagacuauaguaugguguaaacauaacuuuuauaugcacugggaaaucaaaacacuugugugacucacuuuauugcaauauuggcuuuuuuguggugggcuggaaccaaauguguaauaucucugaggugugccuguauuuggucuuaguucuugcugccuggcacagagcuccuauaacccuuguuauuuccugauuaauauuggugauagcagcaucuuucuuauauuuggccuuaguuccauuuucugacauaagagcuucuauaaucuuuagaaucucuggagugccuuuuuguaugcuaaugagaugacaaguggcugagggccccuacauagcuucaggauugaggcuagucacuagaaagaccugcaucugcaagggaugggcuagggguugaagauuaagcuaaucaccaauggucaaugauuuaaucaauuaugccuacauaaugagaccuccauaaaaacucuaaauuauggaguuuggauagcuucuccuacccuauacuuucugcuauaugucucuuccaggcuguuccuuuacaauaaacuggaaauaguaagcucuuaaauucugugagcuguuguagcacauuauugaacuggaggauuuauagcuggucagucagaaguuccagaggccugggucuugcaacugauguuugaaguggggcaguuuugugagacugagccauugacuugugguaucugaggauaaugccaaguuauuauugaauugaauugugggacacucaacuggcugucagacaauugaguggugagggaaaaacagaaacaaaaacaaaaacaaaacgacccacauauuugaugucagaaguggugugguuaaaacaguaguacuuggcuuuuuuuuaaauuuagaaucuaaguacuuaagaguagauaucuuggcaccuaguauuaaauauacuagguucucaauacauauuguuaaaugaaugacuaguaaaugaaaaaagaaugagaaaauuauuucuugcucugaccaacuuccugacuguuuuacucuaagucccaauaaauaugaauauuaccauaauagcuaaaagaaugcuauugauuaaaauguuuccugucauuugucuuuuagcuugaacaaccgauauauauacuaaucauaaauauaaaauaacaggugugcuauaauuuuaaacagcuacuuuuaaaguuuugaaauuguagauuacccucugagaauuagaugcauacaccaagguuauugcuagagggcaagaauuacuacacuuuaagauaaaacacaauggagacuuggaaggguaguaggugcaagguggguggaugauaggagguugcuugguggauacaaugcacauugcuccagugauggaugcacugaaggccguaacuucaccaaaaugcaauauaucaauguagcaaaauugcacuuguaccccacaaauauacaaaaauuuuuaaaauugauaaaauaauaauuaaaauuguuuuucacacucuaauguuaccuugguuugagauauaaugugauccuuggaucucauggagaauauuaauaauucucuuucuuagauaauaacaaaccuguaacuauucauauuugaaaaauaaauaagaacuuuaaaacuguuaccacuuccuuaccucccuuccagcuaucauauuauuuaguaugcucaucaaagacagauuuuaauguauauuuuaaauuucuuaaaaaguuuguaucaagaacucuaagaagaaaguuguuuucugcuguaaagugguagaaaaaucagaaauuaguuaaacaaugcaaugauuuucagagaguuguucaauguuaauauauaaauuauuuugugccuguuucugaaagcaggaaaacaucugagaguauuaaagaacuagcccaaauggguucauuuugaacaaaugaugagagaaggagagagugaaugaaaguagugagccaagcucuuugugugauuccuacucccagugaggaccagaagggagaaucaaaaagaaagagaacaagcccagugcaagaaaccaugcacuggaauuguuuccuucagauuuaaguguuaauugacuauaucuuguguguacugcauggacuuuguuggccuucuguuuuccuuaaucaagaaaacccuaaguuuugggaucuguuuauacaacagaugaucuuuuggcuauuaauaaaaauguaaaauucuugguauuuuuaauguguuauuuaaauuuacuucaaaaguaaugaugcaacuaaaaugaaauaaaauuuccaugauuaucagaauaauuaaauaaauguaaaacuacaaggaaauauuaugaagccauuaauauuauacuuuugaacuauucugauggcauuaaaaaauguuuaagauguaauaugugcuacaaaauugaaaacaccauaggaaucccauuauucaaacaggaagagaaaugguuuagagcaaaauauuaacauguuaaaagcaauauuuuauuauuguggggaaaaucacauagauuaugagaucacaaauauuauuuucuucuuuaugcuuuucuaaauauucuguuuucuauaauaucaaugcauuccauaacuauaaaauauaguacuugaauaauuugcuaauaauuagacucaagcaaagaccaaagaaugccucaaaaugagcuaggcacgguagcucacgccuguaacuuuggaaggucgaaacagguggaucaccugaggucaggaguucaagaccagccuggucaacaugaugaaaccccaucucuacuaaaaauacaaaaaauuagcugggcaugguggcgcaugcuuguaguccccgccacuuggggggcugagacaggagaauugcuugaacccaggaaguggagguugcagugagccgagauugcuucauugcacuccagcagccugggaaacaagagcgaaacuccgucuaaaacaaacaaacaaaaaagaauaccucaaaaugauaaaaggagaaguaaucaaauuucucagacacugaauaaguaaaaacagcuaacaguaauaauuugaagaaaaaaugcauucagaauuacuuugaaaagcagugcuuaaucauaguauauauaaguaguucaauacucauaguauauaugaguuuagaauaggaguuugggacuugcauaagaaauaaaagaauuauuuaaauuauuauaugcuucaagcauauuucuacaaaaacaguauuugcgaaagcauccuauaaaauguaaaacugucagguauuaauauuaaagguaacccuaaaaauguuuuuguuuuguuucauuuucauuuaacaauuucuauugagaaccuagacaccgaaaacggaaguaggcaguggcaaugagacuuagucacaucagacaauaugcugcaccauauugcaaagaagguacaguauagcagaggaagacaggggaauaagcacaauaaagugcagugggagagaugauagaaauguauacaggaccuaggcacaacacaaaaggaaauuaaucauacuuggggaagaagaggucguggcuauucaccaaauaaagaagcaguagcaaagaccuagagauagaaacagcuuuaggucuucacagaaaugcaauuaguucuuucugaaggacuaaugguaagguagaucgaccaugggguaagaaauaaaccuggacagcucaugaaagccagccaugcugaauaacugaauagcuuuuacuccaggauauaacuuacagucuuaaaaaguagagauguggcccacauguuugaaaggucacuggugguaguauggagaucagguucuaauugagggaagggagugggugaacauuuagaaaaagaccaauagaaacuucuuacauugguuuaggugaggaaagaugaaaguccuaacaagaguauuagaacauuuauauuuuauaauccucugauuugcuuugcaacaauuuuuacucacuuuauacagaacuuacugaacuaaacugauaugugcagcucauauuacaguaaugaaaaauguacuaacuuguguaaugugacaaauaucuucucuauccugcauaauucugggggacucaauuaucugcauuauaauaaucucaacuaauacagugcaacaaacuuaaucugaauaauuuaucagauaaucugauaauucaucagauucagugucccagaaucugaugaauuaucaaauucaucagauucagugucccagaaucugaugaauuaucaaauucauccuugucauaauuuuuuugucucaagacuccuuuugauuguuaauauuauugaggaaacaaaaaauucuucuuuauaaugaguucaauguauugccauuuaccauguuagaaagcagaaaaaucacaagcacaucaauuaauaaauuuauaaauuauaaucauaaaucacaugucaacaaaauaaauuucaagugaaaauaaccauauuucuaaaagaaaaagaucuaaugggaugagugcuuggcuaaguuaugcaggucuucaaaauauuggaagauuucauuauucaucuguuaauauuaccacuaaucacaucagaaacccuguaaguuuugagaagcuguugagcucaugguggcagaugcaucuuuuucaaaauaauaauuuucucuugaaaggccaaauuuugucacugacaacaaauauugucaaauguauuuuuaaaaugacagucuccauuuauuuucaaaaauuugucuuuucaauaucuguuugaauaaucacaauuugucucucagucauuuuuucaaauaaaaauaguauucuauggaaguacagcuaguuuagcuugcaacucaaacaacuacacaagugcuuuaccuuaagacaaccagcauuauuguugauauacagcagauguuaaucauguauacuuuccauuucuucauguauacugaauauuaaaaauauguguacuuaaugguauagauuaaauaaaauuaauuucuaguguuucgucaaagacauucuuuuagugcaacuggcuuuaauuuuauucauuuauuuauuuacuuauuuuuacugggaaugaauuacagugaagaauacaaugacaguauaguuuguugucacugucuugauaaguguuaaggcuagggguuucauuguucuuccaaaugucaacacagugaaaaagguaaauaauguuuuuguaucauuaugaaaauaguuuggaccugaugaaucauuuaaaaagucucaagggaaugcaagagcaucuguggaccacauuuugaaaauaacugcuaaaaucacauuaagaauuuuuuggccgggcacggagguucaugccuguaaucccagcacuuugggaggccaaggcaggcggaucacgagaucaggaguucagccuggccaacauagaaaaauuagcugggugugguagugugcgccuguaaucccagcuacucaggaggcugaggcaggagaaucgcuugaacccaggaggcggagauugcagugagccgagauccugccauugcacuccagccugggcaauagagugagacucugucucaaaaaaaaaaauuuuuuuuuugauuuuuuggauuauauucuauaugcauuaaagacuaugaacauucugagaacaugacugugaaaaguuuuuuuuauauguuacugaauggaaggaggguuagaaaucagcagaguaugcaaaaacagaguaaaacaaaaugccuaggaaugaaaaaaaaaagagagagagagagagagagucagggagaguaagauaaaguuuggucccagagaagauacagucaagauuccacuuuuugcuauuccacagagauuucaggaagaaaaaucacacuccuauuuucuuuuucuuugcuuacugauuucuauuuaguuucuuuuuuuuuuuuuuuuuuuuuuuuuuuugagaaagcgucucacucucuugcgcaggcuggagugcaguggcuagauucuucuugaguaugcucaaacuuccuuuuuggaaugucuuccaaaggcacucuugccuucauuuguacaaguugauugacccuuuaaaggccuuaaauauuauugugcgaccucacagacuccucaaaucaccugaaaccugaaaugcugaggcccagguggcacugaaaugaugguauucuagaccugacaccggacuguuuucuccuugguuuugucccaacacacugacauacauagcccaaaauacuacuggccuuuuuaaguggcauaucacauuccaggguaauaucaaaacugcugccugguagcauuugugaagucucaaaguaacucuuuccaggauuuucaaauccacugaauuucuuagauugaaauauguaugugacagaauucucuuagcuuucuuuccucuaugaauauguaauuggaaacucugagauccgguuucucaucuuuauuggauuuuuucuuuaaucuuaaaauuaugaauauuugcuuuacaauaaucuagauaaggaguccccaaccuuuuuggcaccagggacugguuuuguggaagacaguuguuccacggacauuguggggagugggggcuggcauuagaaucucauaaggagcacacaaccuagauccugugcaugcacaguucacaauaggguuugugcuccuaugagaaucuaaugccgccacugaucugacaggaggcggagcucaggcuguaaugcucccuggcccacugcucaccuccuacugugcgacccaguuccuaacaggccagggaccaguacugguccguggcccaggguuuggggacccuuaaucugauguuacuaaguuacaucauuaauaaucuauuucuccucacacagauuucuuuccucacauccucaacacauauaauuucacaucuccaaaugcagcauucccuaauaauuacccuucuuacuccauucugccaccucuggcucauuuucacuugccauuccauuugauaaucuaguaacuucauuuugccaacuugaugaauuugguucuaaguaguuuaaaaauuuaaggacauacuaugucaguauuuacaggugcuucuuauuuauucuucaguauucucaaauguucaauuugaggucaaguuuugcuaaaaacaacucauugcaaauaguagauguuuuauaaauauaagauaaauuucuuaaaauucgugcugaguucuaaagagaaaacuuagguuaccaaguaacaugauuuucagaacaccaccaauuugcuauuucaagucuaauuuuauauuagaccgauucccaaagcuuuuccauuguuacaaaauuuucaaaauacuguacuuuuauuauacaagguuuguggccuaguuuuauuaauauuccaaaagacaaaauauucaaacauucaauuguuucaucaauaauuuaaacuaaauuuacuauuuugauuaaagauacaaugaguaucuuugcaugaaauagauuacuaaauucuauuugaaaacuaauguacacuuuuauucuaguuuuuaaggcaacauauguuuauuuugaacuuuauuuuaagaaaacauaccaaaacaaugccaaauuguuugguaagaaacaauaccaaagcauuugaaaaaauaaauuauuaacaauaauaauuuuguuguguaaaauugugaguuauuucaucauuuuauuaauuuauauuucccuuuugcuuuauguauuacuuuugcuuuauguauuacuuuugucauaagaaaaauaagauguaauauucuauuuaaauuuuuuuuuuguuuuaugcacuuuauguuccuuuuuuauguacuuuauguuccuuuuccuuuauguauuacuuuuauuauaagaaaaaauaagauguaauauucuauuuuuaaaacaaaaacuuuauaaagaagaaaacagaaauccuaauucuauaaaccagagauaacuauuauauuaucuucagggcuuuuucuaaggaaaaacauguuuguuuuuuuuccguaauuggggccauccuagauauauauguuuguaagguacuuuuuaauauacuauuauaaccugggcaauuuuauauagaauuaaauauucauugaaacauuauguuuaaugguacuauaauauuucaucauuugccuagacuaugauuuauuuagccauucuuucaaccuuccagcauuguguauguagacuguuuucuuuuuucuuuucucuuuuuuuuuuuuuuuuuuuuuuuuuuuugagacagagucuugcucugucauccagacgccaggccggagugcaguggcaugaucucggcuugcugcaaccuccaccucccggguucaagugacucuccuggcucagccuccugaguagcugggacugcaggugcacaccaccaugccuggcuaauuuuuuuguauuuuuaguagagacgggguuucaccauguuggccaggcuggucccaaacuccugaccucaggugaucugcccaccuuggccuuccaaagugcuggaauuacagguuugagccacuguaucuggccuauguagacuauuaaucucuccaauuuuguuuggguugaauuaguuuuccuauauggggauaguuugguggaaaugucagucaaggaacuguuaguuaaguuuacucuuaacuaaaaggaucagauucaugacccaaacuugaccaaccagauguuuacuuccuggaauuuugguguuaaacaugaaugucaggaaaaaaaagaaaaaaaaaaaaaaagaaaaagaaagaaagacaaagagccugaaagcaguugagcugauucauucuagauuacagcaccuuacagaaaccaccaaaagucuaccaacugggcuaucugcucuuauaguuuucucugcuccuggcauuuuucagucuagauuguagcuaucccuuaacucugugaacuauaauaucuuuugaagacauugcuuuuauacuuaaauuaaccugagucaguuucaguuacuuauuguaauacuuuaauuuuuuuuuaccaauuccccaugaauuccuaauuuuauauccuuuucugucacuuuccucacugaaauaaaugagcaucuuaauucuuaucacagaucaugaauguaaaugugacauuauaggcacagcaguggaaucagugucaccaucauuuuauuucugcccccacuuuguuagucaucaugccuguaauuacaaaccuaauuaauugccuuuauuagaaucuuaacacauacacagauaacucauuauuauccaguaggaggaggguaugaauaaugaaaauccaucauuuauaaaauaaccacaacaguuucaucaacaacaaaaaaauaucaauuuaaccuucuuugcuuaugauuuuaguagucauaaguauugccagagacaacuguuagaggcugaauuguauccuccccaaauccauauguuggagucucaaacuccgguaccucagaaugugacuguguuaggaguuagagccuuugaagaagugguuuagugaaaugagacuuuuagggugaaccacaauccaauaugacuuguguccuuaaaagaagaugaaauuuagacagaaaagagacaccaggaaugcacaugcacagaggaaaagacagacaucagcaagccaaggagacgggcuuuagaagacaccaaacuucccaguaccuuguucuuggacuucgagccuccagaacugugauaaauacuguuauuuaagccacccugucugugguacuuugucaugguagcccaaguuaacuaauacagaaaccaacccuauuugaauggcacaccucuaucucaaguucaguaguuuccccaaugguaucugugaaacaaaagcauacuagcaacauauauuacaaagaacauggauaauauuuguguaacuuugggaaagcaugugcaauacaguaaauauguuucuuuggaauaaauauaaccuuucccuggaaauauuugcucauuaucuccuuaaauuuucaguggagucacaaaugaauauguuuccaauaaugagaagaaacauuuuguugugaaguuagaucaauaaaguguuuaauaguuaaggguauauggaucaguuuucugauucuuuaaaguuauguggauucucaagaacaaagaaucucacugaccuuuucuuaaaagauauaucccuaguacccacuguaagaaauaauugaugcuaaaaucauaaacgcauggacaacaauguuaauaagacaauucaccggggaaagaauugucuuuucaacacguggugcugggacaacuagauaugaacaaacaaaagaguaaugcugaaccccuaccucacauuauaugcaaaaaguugacucagaaugaauccuagaucuaaaugcaagagcuaaaauuauacaacuaguugaaaaauaauagaaguaaauuuuuaugaccucagauuaggcaacgguuucuuauacaugagacuaaaagcacaagugacaaaagaaaaaaguuagaguagauucuucaucaaaauuaaaucuaaguuuguagguagagcaccaaaggagaaacaggcaauaugauaaggcaaagacuuuugaccauuuacagagaaaagcuaaaaugucagguugauucuaaguuagaagagaagcaaauucacauuuucuagagaagaacuacaguguccauagguaacugagaaugaggggaagcaaauagugaaaaaaauauaaaaagauaaaccauuggaauaugagucuugaaggaauaaaaauaugguaacaaaaguuuuaacauagaugaaaaugaaagcugauguuuaucaaauuauuuugaaaucacauuccuacucauucauuugcaaaaaaaaaaaaaaaaaaaaaaaaaaaaaaaaaaaaaaagauuuguucaaaucccuccaagcagcuccuguguccuggccacuaugggggauguaaacacugguuuucaugcuuagugucucuuucuugccugcaccuggucaguguaucauuucuggaggaagaaaaacugacugggugacuauaucauucuaaccaaugaucucauucaaacaauuuuuuuuucaucaaauaguaccuuuucaauauuuuuuaauuuuuaaaaaaguuuuuagacaagagcaguagugagaagaggggaaagcguagaacaaggaguuugaucuguaacugacugugaacaaucaacugagauaacucacuaccuuuggaucaguucuuuucaacauuuuugaggcaauuuuuuugcauucuaggaacugcaacauuuuuucagagaacuuuacaaacucucaaaacuuuuuuuugugaaaaugacugauuuauguuuuuuuuaaaccuaauaacuuguuaacauugaauguuuuaaauuuauuugacauaacucuuugauuuguuuuuuuaaaagucgggggcaguuagagcccuaagcccaaucucugagauuccacagaucuggcugcacaccucuauggugcuauuucuguucguuucuuuuacuuucaggaucacccacaagguuugugccacucuucauaccugugaggcacuucacccuuuagcaccuuugauucaauccaucauuggccucauuagauuucugcuuaaaaaaacuuuuucuccaccucuuucauuauuuucuguuugcaugccccucucauccucacuaucucuuuaucuugcaguauuuuucuucaaagaacuuacauuuacugacauuucuuugcacauugauuugccuacuguccaacucuaucaccagacugaaagcugcauguggguaggaauuuugcuuuauucaccacauuccugcacuuagaacgcagacccuucuaucuucuauuguacaggagagcuuuuuuuuuuuuaauuuuuuaacaaauagcccggugugauggcucacuccuguaaucccagcacuuugggaggcugaggcaggcagaucacuugaggucaggagaucgagacuagccgggccaacauagugaaaccccaucucuacaaaauacaaaaauuagccaggcauggugacacucgccuguagucccagcuacuggggaggcugaggcaggagaaucacuucaacccgggaggcagaaauugcagugagccaagaacgugccacugcacugcagccugggugacagagugagacucugucucaaaaaaacaacaaacaaacaaacaaacaaauggaguggauuuggguaaucauucuaaaccaaacuguuuuuggaauuuuggcaugucagaaagcagaugaauuacagcucacauguacgacugcacccaacuucaguccugagucucuuggcuaagcuguagcucuaccaucacauggaugaugagcaaacaucaagaacacagacgccauggccacgguguggcuggacugcuuggauucugccacuuacuaacuguauaacccagcaaguuaauugaaccucacugugccuugguuuugucaccuguaaaauuaacaauaguaucuaccucauaggauuaaaugagaucauauuugcaaaguacugcuuaggauaguggcuggcacagaguaaaugcuauauguuuuugauaaauaaaacaauuaauaaauggaaaucuaggaauguggacaaaauuuaaaaguuggaaaagcaaacuuuggggcagcuuggggaauucugucacaacuuauuuuucugaucacaagugcaaugagaauaaauuucuucccacccuacccuaaacuaaugcaaucucaauugagcgguggaacaugcuucauucacuaauuagaauuuaaaaaggaagugauaaccucacggagcacagccccauugacccugagggugacuauacaggaccuucaauugcugauucucucccauccuucucugggaucuguuucucccacccuccccauucugagguagcuggaagagaguaggcuuugugcccuuuggcgaguacagggagaaaauaguagguucagccucuccaacugcccagggagaaagcaauaccuuucaagguccccaggcuaaauuuuggagggaugcuuuugugugucacugucaggcucacaccgacauaaacccuugagaaaugccugguuggugacguccuagagguaacaccaagcaagccccagauuuucucuucuucgucagcaauucccagaugaggugcucuuguguuuacccucucugauugucuggauucccugauaguacccucuauacaaggaacuagaauguuucuuacuggauuccucuguugguggugauagaguuuacuuuggguaucuagucggucugguugccccugguaucucugguugguacaacagaauccugacugagcuccuuagugccuucuugaauacuguauaauuaacuaggccuccaauugugccccgccuugccccagcccauagauggacaaucccuccugccaugucuuaaagagaaauuaccauaauaaaugacucuccagacagcacauuucccagcaagagggggcauguaaaccaagucuauuaguauuggcagcaaaauccaauguguuauuguuaccaguaugaacacucuggguauccuggccuccuauauagauauuugaaacaaaacagacaaacaaugugaaggaaggaggaaaaacagccacacaaaugaguuacagugaguuuaaugaaaacuaauuccauugcuggguccaugugauauaaccagccacuugugcucuguucuagugguuuauaauguuaccucacccucuccaagaaauugguuucccguaaaucucuguggccauucauuccugucuacacauuauguuccuaaaauagacaccagcuaaaaaucucuuccaggagcuuugugaaggaaggccuaaauugcaaaacuccuccuagaagagagaugugauuuuguaauugcuucauugcaauuacaaaagcaacaaucauaaaagagaguuuuaaaagaguuuuucaccacagucauucuccugaaaugcacagcugagggaaagaagaaugucagaugccccgcgaacgugcagaagcucccaguugcaucacccuggcgugccagguauugcagcaaauaggaaagguaagcuacccacuucucugggcaggagaaacuaaagcaggaaucaccaaccucagcauggaauuuuccuauuucugucuggcaacauccucuugggaugauuuaaagugcuuuuuggagaaauauguucuguuacuauacuagcgcaucagaaauaccacgugaaccuguaaauccauagaagaagaagacacauuuuauaggugugauagcaacagcaauuggcaauuugcaaguuugcuacugcacucagaaauauuuagucacaugcacauauugacaguaauauacccugccuugacuuaauuguugcauuggacaggugaaaagcacauacccaccacuccagaccgauuuguuaacaaucaccagugaguaaucaaagagaacaaaaagaaaugagaaguaaaugcagcaagugggucgggucuuuaaacacauaccucaaacagguaggagucaggaaauccaugauagcaaagacauuuggacaagccucaccuccacucagaaauaauucuuaugcuguucugaaaagcaagacgguucacacuaggaacugagcaguaucugcaguaucauugcugguugugaccucugucuaaguaaaaguaagucaauguuuccuauuuggcauuggauagaaaaggggacucuuuaccacucugcucaagcucuuuuuuaguguggcucaauaggaguuggcagagguggggggcggaaaucauugccccuuccuuguucaaggcaugaggcauuucuucucaaaagcccagccucagccucaggaagcugaauaccccugcaaugcuaggcuccagcagcagccccgcugccuucuuucuuccuguggaguuaaaacugagaucuaauuuuugcuccguccuuaagaacaauaugaccucuauucccagccagcuaguccacuuccaaagcaccagugaaggagggggcuucaacaggaucaaaagggaccuugaauaggaugaaggcaagcaaaggcaagaacuggccagaugccaagcuauuucaggccaaagaaucccaucuucuaucaaaaugcugaacugcaaaacaaaccugauuucaguucauggaagguugagagaggaggggggaggggaggggaggagaagaggaggagagggaggagggggacaguuggucugaauacacauacaaaaauggacuuccugcucugcccaaacugaauuuccauggacucuuuuuccaaaggaauaacuggaaugaauaaacuuaaaaucaagaugaaacaauuagauggcuuaccugauuaaaaggaaaauuauccaucugcagugaggaacagcaucacccaaagacgagaugauaacaaugugccuucaguugcaauuguucagauuccuucuugcaaaaggugucaaaguauuuacaagggcugcagucucacuggggcagaacacacagacacacaaacacacacaaacgcacacauacacacaugcaccagagaccucugcaguauccucucggcuucauccucgccucacucuaugguaccuaauacaaaucagcaaauagcuuguuucaaaaaaaaaaaaaaaaagucaagacagcaccuuacauuacaucgccaucuaguggcuaaauauuaaacacuuucucacaauccagauuuaugauuucuuccucaaccucuuuucucucagccuuuuuuccuuucuucucuguaaucucccaguauugcuucuccuugcuucucuuucauucccuauugcuauauaauaucaugaaccuaaugacucaaagaggaaaagguuugaaaguaaauauagcuauuuucaaguaguacuugaaaaacuuuagcauuauuuuaguuugaaacuguuacuuuauuccuaauaugaaucauuguuaucuauaaaaaugauauaucuuauaaauaaaacugucuuuuuauuccaccaggaaacaaucagguggcccuuuauuacagaucuauggcuucacauuuuucuguuuuaauauuguguuuuaggauuagguuucauauuauagugaacagcucagagucacaaaaugugaguuuuacuucaacacugaugaacacaugccuuuaacaaagccacugaagucuucuauggacauuuacauucuuacuaucuucaucuguaauuacagauuaaacaagacuuucaacccacucucaauuucuaugguuuuacuauauuuuacuccaauguuuucccaucuuguggacacagccuaaagcuuaauuauaauaacacauuuuaauaagcaaauauauauagaaagagaguccaauugccuauuacccaaagauagaauuauaaaaaccaugaauaucaguuuuuucuaagacaauaaaaauccaugccaaacuaauuauaacucuuggaacugagaguagagcuuuuuauguuauauauuguauucuaaaauggaaucagccuuaaacauucagucauacauaaaaucacgauuauguguagauuagucauuggaaguaaauauuucauccucauuauuuuucuuuugccaucuaacacacuuauuacaaucauugcauguguuuuaucauuuaucaauauaaccuucaauauuuaauccuucucuuccuuauuacaggauggugagauaaauacuauuaauguuauuauauuauaauuauuccuauuuauacuugagaacacugaagcuuucugagccuuacugagguuuauucaagaccacauagcuugcaaagcaauaaaacuaaggcuguuggucccaagagcccaaagaauaauccacuguucuuugcaacauaccuaaaaguucaccauuuuuuccuguucuagaaucacagaaaaguaauuuugauuucuauguuuacaaaacauuuacuagcccuuaauuauggaccaauggguccaucuuguggauccaucuuuuuaucuauaaaagaaagaaauuaaguaagauaauuuccuguuccagcucaaaaacucuauccagugcuuucccaaaagccaguuggaguagcaugaacacauucauuugaaguuacucaaugucugggaaaugauguugcccaguaucugguagagucagggcaaaguugaaagaagaugaggagacaggugaucaacaacugguaaacgauugccaagauguuagagaugaaaagagagugggaacugcaugaacuaacaggcaauuuuuuuagaauaauacauuccauaugaauaguacuuagagauuagauauguaaaaacacaaaauaagaacauaccuggccacauguuuuaaugaauucuaauugcauauuauaggugccaauuuuucugagugucugcucuuaacaauucccccaauaguucuucuccccugauccuuagugguaaaccuacccucuugcuacagaggacuggagcaagagaggguaucuacgcagcugaccuggucaaagagagccacuacaugugauucuggcagcuauggagucagcuuucccucaccauggggacucaggaccagguggaccaggauacugaaauagcagccagccacacagauguggaggaagaagugacaaaagacagagacagacuguuuccaucuccagucuacucaagauccaaacacuuucuugauguugagucccaugauaaacucaaacuccauguuugcuuaagugaacuugguuucuguugaacuauggaguccuaaccacuucauuagcuucaagaaaguugccaguacugcaucuaucaaguauuauucauauucugggcaucugacacuucauuuauucacuucuucaugcaccugauauaugccaggcacuuuuccagauacuuaaguaacaucggcaaacaaaccagaucaaaacccucccuuuguggaguuuacauugacaugucagucauauggaaaggcacaacgcauucagugugcacacuaccuuucuuccgccuccaugucuuuguucacaaccuucacuucucuuggcagaccuuucauccaucuacacauagcaaauucggcggauauuuuaaaugucugggucaaauauucucucuucuccaacgucuuuucuauuuucucagcagauagaauucuuuuuucuuuuguuaauuauagaacaauuuuauguuguaucuuaugaaacauggucauuugacaaguugaaagcauugagcauaaggagauaaaugacuauucucauacagacuccuagaaaaggccaauaucccaagcauggcccaaagaguacuauuaacuaacaacucaucauucuguacacagauacuucauucgucagagcugaagcaguuuuacaguauuaguaacuuuaaaucuuccauguuucagacugagcauaaaggcaaaauaugagauuuuuauuaaauuaguguaauaugcacuuaaaaucacauauuuauuuuuuaaaguuagcagaagauauuaaaacaaaacucugugcuacccuaugucacuacuacacuuaucccauuugaccuuguucuaagaguuuuauauauguaucuuauuuggcucccagaauguaaacucccuguggaaccagcuuugcauuuuauuuauuuuuuuguagauuaauuuauugagagauaauuuugucucuuucucacuguuacguuuccaacuucaaaaaaugaaaaacuaaucuuccucugcccccguugguaaaguuagccauuccaggaaccccuuuguaaucuuguuucagaagcuggaaaaaauuagcugccuacuuccuaggugacaauacuucaaucuguaaugcaugaaccugcuaaacaggcugagggggcauggcuguggcuuuuuuaugagaguuccuaacaaggaaaagagaaugaaggcguaagaugucauuuagucuuuguaagacuccgucucuguaagacuccgucucuguccugugaaugugguuguuacuuuguuauagcucugucaguugcacugcucagugccaaaacauaaaagggaauauuauaaugggacauaaucucugucaauagauuuuggguauuaaagagagcgugaggucacucagguggaaaaagcugggccagguaauuuugucuguuaguuuuacgacauaaaggagagucucucgaugccauuagaucuugaaagaguucaaagagagaacuaucucauuaucagaaggcugaggaauuaguguaauuaguaucugaauauucuuuaauauuuucuugcauagaaaauaaagguaauugguuaucaaaaauauucuuucaaauguguaucuccuggaguuguggaguucugaaacuuuaaccagcugccuuaugaagagaauuuauuaauuaacuuuaugccugccaaggagaaggaaaccauucuuaauuuuuagccaaaaauuucccaaagugaugaccaaaucauuauguuuugaguuccagauucccuuguuuagaguuauaaaugacauuugaguuuuaaggcagaaauguuucuaaauuccccugucauuuguuugggaaucuauagucacugagcaacaugaagcugggucuccccucucuucccaccgcaggaaaggaauuggaggcuggaggcgaacuugaguaccuugaggugguaucccaaaggagaugguggugacaacagacaagucuagauguuagcaggucuucugaugaagucggggagugaucccaacacagauagcaaaugcuagaguuuggauuuaaacucagaccuuaagauuuuagaucuacaggaccacuguaucacuacaaauccugacuuugcccccuuuugauuggaauaaucagauaaagcacacuacugaugugauccuugguaaauguaauuuacuacuuaaguacuuugcuuuuguagaugucaauuuccuagugguuuuuuuuuuucuuuugguaaaugcagcauucugcaaaaaucuacuaccaauuccuugcucucacaaagcauucaccaacacugugccacuauuuuagaaauagaaaccauauccuagccgaaaaugauaaacucauauauuuccuuuugagauuaaccugcccuuuugaaagggagucagaaaugaaugugaaauuuauuugcuauuagacaaauaaaugcagaaacugcaauuaagaacucucuuuuaggacuagagccaacuaguuuuucugcaaguuuaaaguuacaauuuuuugauggcaagaauuggccaacugauuucaaaauaucuuauagguacuaaaguggacuuuugaaacucugguaaaguccauacauuccauaaauuaaaaaaauaauaaucagccauuuuuuucaaauaugauauaaaaauaucugagggcuccuccccuccccgcaacuggaauucacugaaucagagcugcuauaggcuugcauuuuuugaugcacagauaaccaguuuuuaaaucacuuguaauauaaugaacauaaauaauugaauuuuuuuuucuuacagauuugauucugaaguauuuuugaaguaucuuuagaaccaaugugcuugugggcacacauuacacuauuuaaaauuuuauuaaaaguauuuuaaaaauccuuagagagagaaugccaguuaucucucucucuuucugguaguggagaagaaaaaauaguauaggcuuuucuuaacucaccacaaugcaguaauuaaaagcaaaagagaaaggagggaaguugugggauuaugauggagauaaucagauuccccaguugcccucugccuucccugcuaucgagacaacgcacagaagccagaauuaugucugcaggugauuauuucagggaagcaguuacuccuuguuggaagauucacugcaauuuccuuucaauuacauaggcagacauugguguuggagagggaaauaacaauauuccuaaaccaaauaaguagcuuuuauaaacaagacagaauaauacaugaaccugauuucucaaagggaaauuaaguauaugaaugucaaucaucugaugagauuagcauuacaauauagguucagaaugaguauuaaaucacaaaauuacuuuuuaucacuugauguaauagcauuauuccucugauuauaucaccaacugaacagcacuucaaaaauuacuauagugcucuguauauaucuuuaauuuuaaauccuuuauuauuugggggccugguuuauuuuugaucuuuucuucuuuagcuaacguguaagaagacauuauuaauauuuagugaagaugacacuaaaugucguuuuucaaaacaacaaacucugccuuuuccuaaacaagcagggagccauuaugccuucacuguuccgcuuccuuuguuuccucuguuuucaggaccuucucuucuuugaccgcaucuuccuccacccucuaucggugcaccucuccacggucugaccccacucaauaaucucuuugaaaguaagaacuaugacuuauuuuuuuugucauuguuccccaaacauaucccaagucugugguagaauuaagguaguuucuggagagaaccugauaacaucugcugaguauugaugaauaaaaauuccguaauagacuuccaacaaaacccuggaguagaauaaaauaacuuuguaaaccucauaaaaaagaaugucaauuuacauaaaucauuaccauugcuuuaucgauaggguuuugcuaaucauugagaaauuguggagcuggaaaagucucagagauaaaccaggcaaguguucuuauuuuggauaugaggaaacugaugccaagagaggugcagugacuuguccaaggucacauagauaguuuuauaccacaaagguccauucaaguuuucccacaguuuaacucuaaaggaaauuaauauugaguaagguacaucagcacauaagaagcaaaauggaagugagugaaguauuucuagauaugccacaauugauuuucacucauguuuugacagagagauggaugugaugaaggguaugaaugcaguuacuguuuaagaaggugauggacuaaccaacauugguuuuagcaaagaauaaagaaagugacuguccuucaaucuagcuccacaugcgguucuuaaauauuaaccacaaaguacucaagcccaagggcacgagcucuggguaugcagaguguagcauugacagcuuucaggaaugcaggcccaaagacagcuccagaaaauauccaggaagcaaacuaucuugaaguucuauacuuucuuugaaaugccaagauguaaucuaaaaauauguguucuacuuuuuuagucuaauaaaccacauuuauaugaugguuaucugucauauggggagacaaaauucaacauuucacaugccugagcuuuauaccccuccuuuaaauguaucaagauuucauaaagcuuugguucuucagaaaagaucaagguacaucacaauauuuaaagcauuaucuccauaucuauugccacaggaggauaaagagaaaauaaacauaaaugcaaauaaugaaaaugccugagcaaucauaaagaaugaaguuacuguguggauucuauucuguguuuauguguucuuuccuuugcucuuaagucaguuaaacauaaugcuuggguucuuuccugauuuauuucauucagcaauccccccuaccccccgacaucccuugcaaagaugaaucaacaaaagcuauuaccaagaacaauaugauugauuacuuauuggaacucgaauaccaauuuuccacuuaaguauaucuuuauaucaaucaccucacuugccuaccuauugaagaguuucaauuagauuuuuuuaauaaagaggacuuucuuuacucuaaaggauauagcugauauuuaugaagacaacgcuuuauuuacagaauaaaacugaacuuugccauaacuuagcauaagcaaauauguaguuucuguuucccuaaagaauuccugucaacaucuuuuuccuuucauguucaaaggcagaaagucauugacuuuaccaggagcacagcaaagccaucuguaaaguauacaagugucgcuagaauuaggugcuaccauauuucuuggggaaauuaacauuuuugacacaucuguaugcaguuccaaucuucggauaucaauuuacaaacucacauaaauuacauuugguuacaucuuuucuuuuuguuucuuuccuugagaaaagcaagaauucuacucuaggccaaauaauggacagaaaucauuaggguccacuccagggacugaggcccuuuagaagagauuggcaagugacuagggaaaagguacaucgaaggucagaaaauaaugacauuuagccuaguucuccucgugauuccuuggaaauuuuggggcccaugagcucaguugcugcuucugggauugccccuauucauaucaaauagcagagaacugagaugucuuacccacaccugagaagauucggaugugagcaugggauagaggugcuaggcagcggcacuuucaugccuaagugcagucucucauaccuguucaucugcaguggcaugaaaggcaaacagauucuucugcucauuauggguuguugaaaugacagaaccacuuugucucaacauuuucuaugacacuugauacauaaggaagcucagagacuaaaguccuuguuuccauguugcacuaggucuuuuugaaagucucuuuuacauucugauugcuaucaugacaucaaagucaccuguauuccucaucuuuguggggaagagcaggcuaaauaaaguagguaaggacaccuucugagucugcaccccuuuaauugacacauaggggaugugaccccugacguuucugcuucccuuauucuuucugcaacuaagcaaacauagaauguggauuuucccaugcucuuagcaaggaugaaacucagcgaucauuugcucuacuucacaugguaguuguuucuaagauuacauaucauauauaugcauauauauauauguuauguuaugcuacacacacacaacugcuaaugaguguucucucuccccuuuucuugucccucugcucucuaggacagcaguagcuuuauauguaucucuaucugcccuaagucuccucucuugggcaucacaaacagaguuacccuuccaugaaccauuuguugcuuuaaaauuauaccucagaugcagucaugguccuagcagaaaguagaugguacauucaaaaugguuaaaauaaaaauaauuauggagaaacuauugaccaaguggguuaagaugguugaugagugcccaggaacuagcaauagagagagccaaugccauuccaggcaagagugaaaguggcaccagauuccggugagagcuagagcuuuagaagacccaacugagagguuuaacuaaagaggaaugcagcugcuuuuuuaagcuaggaagugagguguggucggggagacucuccaauuuucugcuaaugccugucuugggcugcauucaaagccaacggaugaaggaccccaaguuucucaaucccuggaaaguggacuugaaagucuuucccucuacuuguccauuauuccacuucuaaccuacauuuuaauacucccaacacucucuucccuggucugcauuccuuggaguccagugcuccugcuaguagcccuucuuccagggcuccagcauuuguugggcucugggaauguuuuuuccagguuggcaguugugaagggcuggugggaacuggggaaaauaacaaugugucucaucuuaucucuaaaaacaucucuuuuucuuuguuuaaaaagcaaaacacaugugucuaaaauauuuuacagagaugaacaaaaaucuuuaugauaaaagauucuauuuaauacccuaacccuuaauacagugccuaguauaugguaguguaugauaugguuuggcuguguccccacucaaaucucaucuugaauuguaacucccacaauucccauauguaguaggaggaaccuggugggagguaauugaaucaugguggcgagucuuuccuguguuguucucaugauagugcauaagucucaucagauaugauggcuuuaaaaaugggauuuugcugacacagcucucuuuuugccugcugccauccaugugagaugugacuugcuccucguugccuucugccaugauugugaagccuccccagccauuuggaacuguaaguucaauaaaccucuuucuuuuguaaauugucaugucucagguaugucauuaucagcagcuugaaaauggacuacucaguaaauugguacugggaguggggcacugcuaaaaagauucccaaaaauguggaagccacuuuggaacuggguaacaggcagagguuggaacaauuuggagggcucagaagaagaaaggaaaaugugggaaaguuuggaacucccuagagacuuguugaauggcuuugaccaaaaugcugauaaugauaugaacaacgaaauccaggcugaggugaucucagauggagaugaauaacuuguugggaacuggagcaaaggugacucuuguuauauuuuagcaaagagacugguggcauuuugucccugcccuagacauuuguggaacuuugaacuugggagagaugauuuaggguaugugguggaagaaauuucuaaguggcaaagcauucaaggggugacuugggugcuauuaaaggcauucaauuuuaaaagggaaacagagcauaaaaguuuggaaaauuugcagccugacaaugcaauagaaaagaaaaucccauuuucugaggagaaagucaagcuagcugcagaaauuugcauaagcaaugaggaucugaauguuaauccccaagacaaugaagaaaaugucuccagggcauucagaggccuucauagcagcuccucccaucacaagccuggaggccuaggaugaaaaugugguuucaugggccaggcccagaguucccaugcuguaugcagccuagggacuuugugcccuuugccucagccauuccagcuauggcugaaaggggccaacauagugcaugggucauagcuucagagggugcaagccucaagccuuggcagcucccacgugguguugagccggcaagugcacagaagucaaaaacugggguuugagaaccucugccuagauuucagaagauguauggaaacgccuggaugcccagcaaaaguuugcugcagggguggggcccucauggagaaccucuguuaaggcaguauggaagggaaauguggggucagagcccccacacagauucccuacuaguguaccacuugguggagcuaugagaagagggucaccauccuccagaccccagaaugguagauccacugacagcuugcacuguguuccuggaaaagccacacuuaaugccagccugugaaagcaacuaggagggagucuguacccugcaaagcaacagguguggagcuucccaagaccaugggaacccaccucuugcaucaacgugacuuggaugugagacauggaaucaaagaucauuuuggagcuuaaagauuugacugcccugcuggauuucagacuugcacagggucuguaguuccucuguuuuggccaauuucucccauuuugaauggcuguauuugcccaaugccuguacucccauuguaucuaggagguaacuaacuugcuauugauuuuauagccucauaggcagaagggacuugccuugagacuuuggauuguggacuuuucaguuaaugcugaaaugaguuaagacuuuggaggacuguugggaaggcaagauugguuuugaaaugugaggacaugagauuugggaggggccaggaguggaaugauaugguuuggcuguguccccacugaaaucucaucuugaauuguaacucccaccauucccaugugucaugggaggaacccagugggagguaauugaaucauguggguggguuuuuccugugcuguucucaugauagugaauaagucucacaagaucugauggcuuuaaaaaugggaguuugccugcaaaaacucucuuuuugccugcugccauccaugugagaugugacuugcuacuccuugccuccagcaugauugugaggccuccccagccacguggaacuaugaguucaagaaacuuguuuuucuuuuguaaauugcccaguguauuaguucauuuucaugcugcugauaaagacauaccugagacuggguaaucauggcagaagaugaaaggcacaucuuacauggcagcaggcaagagagaaugagagccaagugaaaggggaaaccccuuauaaaaccaucucgugagacuuauacaccaccacaagaacaguauggggaaaacugcucccacgauucaguuaucucucaccaggucccucccacaacacaugggaauuaugggagcuacaauucaagaugagauuugaguggggcacagccaaaucauagcagguagagacucaggaauaaacauauggauauucaagcaguacuauuuuuagauaaauucuaagaauaauuuuagaauaauaauaauuguuguuaauuuuauugaggacuuaauauauuuugggaccuucaaaccucacaacagucucauaaaauaguugcuauuaccauguuaucuucaugaauuuauaaaugaggcaacugaggcucagaguaguugagcaucuuggccaagaucacacaguaacgaggugacuaagugugauucugaaaccagcaguguaucuccaaaguaccuaaucuuaccauaaggccauacuaaaacucuccacaauaucacauuauuaaaauuaugguggaaagucucugcaauucgaguucacaggcaaacaaacagaagacaauagucuuucuuuacugcuaaggauuacaucacauuaagcucauauaaggacauaaugggggagagacauuucuacaaguagcugaccgaagauaguuuuuagguguaugaucagucuguagccuggauucuugucaaacauguuagggggcagcauguggcagggugggagggaggcaaauggagaucuuccuucuuacuugucucagauucuucaaucuuccauagcaagugaaagaauauaacuauguuuggacguacucucaccaaguuaacaaauacacuaaacacaugaguagugaggggagaagcaugccucaaucuggcaaagcuucaaucuccagaagucuaaauuuguuagaaaugaaaaagcuagcaaagcagaacugcugaucgugaacacuuaacaguaagcuuccuuugguggaagcuucauguugcaaacaucguauuuaauuagguguuuuuuucucagcucauuuucuaaaaacaagugcuuuucggcucugcuugauguuugugaagacacggaccgcgcaaaaccaggauacuuucagaauuuuaaaaccuugcuucugaaaguguggccacauacuggcagcauccccacuucuugggagcuuguugaaaauguggacucuuuggcuccacccagaccuucuaaauaagaaagugcauuuuaacaagauuuccccaggugauucugugcacauugguguuugagaagcccuggcugucacaucuggccucagcucuuaaagccuacucacuuccuucugcaccuugaacauguaaaucagccauucugcccugcucaccacuccccggguguucccauuccccuuugcagcccugcuuguacauacuauuuagauacaccaagcaaacccaaucuacucuucuaagucacauuucuaaugucaauugacuugaguggcucuugaaguaaaaauuaacuuuccaguuucucuucccucaggcccagucugcaguggcaaucgcuguuaauuuuuuuuuuuuuaucuucuuuagaauucuuguguauauccaagcaucugaaauauacguguuuuauauuuuucuuuuuuuuauaaauaacauuguaccagacaccaggcaugguguuucacacuuguaaucccaacaauuugggaggcugaggugggaggauugcuuggggccaggaguucaagaccagccugggcaacauacugagaacccaucuccacaaauauuuuuuuaaaaagaaagaaaaacaucacacaauauauauggcuguaaaccuaguuuaaguuacauaauuuaucucuaauuaguucacuuauuauugcuuaaaauauuuuguucuguauauagauggauauaccaaaguuuauuuaaucaguucucagaugauaaacacuuauguuauuuucuuucuuucuuccuuuucuuuuuuuuuuuucuauuucaaacaaugcggauguauacauuucuuuacaauugcauuucccacuugugcaaauuuuccuuuaagaucuagucucaggaaauggaucugucagguggaaggguaugugccuuuuaacccaguagguaucaauagauuucccuccaaagguguggcaccauuuuauauuccagaacagcauaagaaacuguuuccaucaccagaaauuaucaaacuuuuuucuuuguugacugggaaguagaaucuagacugucuuaaacuuaucuaggaauuucucugaggcauuuaugaguagacacaaagaggguggaggagaaagaggaggugcauucuaagaagaggagauacauguaggauauauguaaaguugggucuguggaaguggcuagagucuggagagguaggcagacagccagaucagaagggccuggcacaccugcuaaagagggaaaacuggaaccgcauucccaaggaauccaugaaaauaucguguugagaagauaaaaccaaauaguuugcuuuuuauuuccacaaguuuggaggagccaucuguuucuugucagggcauugacugauaauaguugugucuuuauaauuggguuguuuucuccuaaaacucaauuuagacaaaguaagugucagugugggaggguuggcuaauuguuaggaagcaacauuugguaaaucuggaggccaaacccaaaacuuuuauauuuuuauauuccugguugugcuuacuacuauaaaguuaauuauaaugcuuuuacuagaagcuguacauuugaaaucaaaacacucuaucacugcuacuuucccuucucccagcaugagguaacaauaauauucuuuaggaaauuucauauggaagguugacaccuguuguacuuuccuuaccucucugaauaaaauaauuccaacagaacacugacaacuuuuagaaauccaauuucacuguuucacuugcugauaugguuuggccguguccccacccaaaucucaccuugaauuauaauaauccccaugugucaagggugaggccagguggagauacuugaaucacgggggcaguuucccccauacuguucuaguaagugaauaagccucaugagaucuguugguuuuauaaaugggaguucuccugcacaagcucucuugccugcagccauguaaggcgugucuuuucuuuuccuuugucuucugccaugauuaugaggccuucccagucauguggaacugugaguccauuaaaccucuuuccuuuauaaauuacccaaucuuggguaugucuuuauuaccagcacaaaaacggacuaauacacucguugaauauaaaacagaaaaaggaaugccacuuuaucagagagcuauaauuucauuugaaacaaaacaagaaagauuuauuuuuucagaacucagcauuuuuuuuuuuuuuuuugagauggaguuucgcucugucgcccaggcuggagugcgguggcaggaucucggcucacugcaagcuccgccucccggguucaagccauucuccugccucagccucccgaguagcugggacuacaggcgccugccaccacgcccggcuaauuuuuuguauuuuuaauagagacgggguuucacuguguuagccaggauggucucgaucuccugaccucaugaucugcccaccucagccucccaaagugcugggauuacaggcaugagccacugcgccuggccagaacucagcauuuuuaucaaacaaauuccagauccuaagacaugugugacuaaggauguauuuugggguaaaugaggaaaacaaaaauguugagaccuuuacuuaucuucaauaaucaaugcaucuccaaaauggcgcuauuaaaucuaaucaucuuggauuugguugauauuuggauggucauauugccgagcuaaacuccuuuaccuagaauauuauaauuagaaaaaagucugaggaaucaucuaauucaggcucucaguugacaaagaauuuaccuuacuuugguaaaaauuuguuuggcuuuauguggagguuucucaaaaaacuuugaauaauuauuuucugaaauaauauucuaaauuggaaauuggaauaaaagaucauucacguucaucuugaguauucacuuuaagacuaaagagggaagugacuuugugauccagguuugugacauuguauuuuaaaggaggaauuuauauuugaucuugggaacaauuuuucacauucaaagucugagaacaucuccguaucaaacccaaagagauuuucucaagugaaauaaagugaaacaaagaaaguagcauuagcaguuccgaguugcagacaguucuuuuuaaaauuuguuuuuugguucuuccaggccucauuugcaaguugcuacuuaauuaacuagggugguuaauguuagguaaaguccaaaauguaaaggaacuacauagcaauaacaauauuucaguauuucuucaauaaaaguuacugacacucucuauaugucaagcacuggagggugccagugaaaagagauggucuguugcuauguucugcauuuucguuggugaaaacagagaaguuggcugggucaucagugugguaccucugguaaagcucaaguauagggaaauuuaauucaaucucauguuugaauuauucccucuuaaggggguaauaauccuauucccauggaguuuuuugagggcacuaagugauagaacacaugugacuaugacuaguauaauaaaugauguauuaaaaucauucuauaauacauauaccggaaaauuaauuaagcauaugauacgaauaaauguaugauaagucagguaaaaugcauuaauccuaggaauaaaacaaagcacugguaaucucucugaaggucuuagagcaggaagacucuugagacaggucuuuauaaaaaaucacuuagaaauuauacuuaccaauguguucaaacuacaugaacuauugaguuuugcuuuguaggauaguggaacgagaagugaauuuggcauuuggagaccuugagccuuuauuuucucacugcaaaaugacagagauaauggggccuaucuuuuagaguugcuaugggucucagaaaggaucaugguuuuuuuuuuuuuuuugagacagagucucacucugucgcccaggcuagagugcaguggcgugaucucggcucgcugcaaccuccgccucccggguucaagcgauucuccugccucugccuucugaguagcgcaccaccaugccuagcuaauuuuuguauuuuuuaguagagaugggguuucaccauguuggucaggcuggucucaaacuccugaccucaugaucugccagccuuggucucccaaaguguugggauuacaggcgugagccacugcaccuggccuaaguaauuuuuuuuuuuuuuuuuuuuuuuuuuuuuuugugggggacagagucucgcucugucguccaggcuggagugcaguggugcgaucucaggauuucacuguguuagccaccuggucucgaucuccugaccucgugaucugcccgcuucggccuccccaagugcugggauuacaggcaugagccaccacucccggcagggaucauguuuuuaaaauuacuugaaaauacauauauagucauucaaguaugagguauuauuauuuuaacagaaauauagcuaccuauaucuuauauuagguuccuuaauccacauauaucucagaauagcaccuaauuugaauuguagaauaguauauugaaaagaaucuuuaacuguuggagaaaaauuuguguguguguguguguguaggcgcacaugcaugugugugaggcuugucuacuucuaucgcacauaucaggucgagaaaaugucuguacuaaauugccaagugguuuagguaaaaauucaugggaagguauaauuuaaaauucugagacucuagcuuguaacauuuguaauuuuaaggcuaaagacaugaaaaugaacuuaaauucaauauuccuuccaacagccuaugauuuuauaacuuuaugauuauaccauaugaccccaacugccuucuauguauggugaaugguucuaaauugaaggcccuuuaucuucuaaacucuuugaugaguuugggcaucuacgucuggauauaagagcuguggagagauggacuacuuuccauacuaagaagagaaaaauuuggaguguucagaucucucagggaggggaugaggagcagagaugggauggggaagggagaaaaugcggguagaagcccacaucuuuaauaaaauuuauuaaauugaaaaggugauugguguagguaagucucuguuaaaaacuagggacagacagacacugggucacuugacagagugguuagguguaguauacaugaaaccacgaugccaggacacagaggaugauguaagacuaagucccugauaaguugcagaagguuuuggacuuccacugacugugguauugguagauaccugagcaagauaucugccaacagauaucuaccaauagaucgucaccuagaucuucaagggugcaaacaggucccaccuuauaccugaguuauacaaguaaaacaugucuucauuuauuuauaaguuuuaaccuaccuacuuccaaaaggauaaaugauauauuuguuguauuauuuauuaugauggaacuuuucauagcggagcuaaucuaggucagugguucucaaaugaggaggaggucaguuuugccuuugguagacagguaucaaugucuggaaauaucuuuggucaucacaacugaggguuucuauggacacuuuguggguagaggcaaggacccugcucaaaauuccacaaugucugggacagaccccacagcgaagaauaucugacccaaaugucaauaguacugaguugagaaacccugauguaagccaaccucucaucuuaauaaaugagaagcugaacaucaaagagggucagugauaugugccaaaucacacagugaacaaacagauaaguccucuaguauuuuucccauuacaguauuuaacuucuaagagcuaaaguucuaaaauggaacuguuggaaaauagaccuucuuauggacauauuuagacuuaagguauacucaauaauugcauaaaucuuuaaaacauaguacugcuuacaguaggauaucuaggcaaagaugaacauagaaaauuuaaugacaauauguauuuaacuauauacaguaaaaaccauuuuuauaauauuuaaccaaauuacuucccagcacagugguucucagacuucagcaugccucacagucaccuggaggaaaggcuuacacaaacacagauugccaggacccaucccuagagcuucugacucaguaagucugucaugaggcccgaaaacaugcauuccuagcaaguucccagguaguacugauguugcugguuaggagaccccacuuugaaaaccacuguccuagaauuuaguagguacuuaguaaauuuuggcuuaauauuguaaauauucaaacaauauaaucucaccaaaaaauguaaucucacuuuaacauagauuaguuaauaauguuaauucccauuuagaggaauacaaagauauauaugguagaaucaaaacuaauuuaaaccucauuuaauucaaauuccccauuuuaaaaugaaaaaauuaauauauuuuaagcuuauuacaacaaagaagaaucccuuuuagcaauagccaaaagaaacaauauuaaaugcaaaucaauuauagacaauuugaacacugacauuguuaucugaaagauauauaaacucaaagauuauaaguacaauuaaguauguauccaucauuuuuuaacuuaugaggaauagucugaaugccaaacugaguaaaaccuggucugauggggcucuuaucucaagcuaugucuagggaaaaugccuauugacuucaguaauauaaaaucaggccccgagggaccauaauugucucuuuaaauuauuugggaaaucauguacauguuuaaucaacuaaauacagcauacaauuguaagugguauauuuucaucauaaauaaucaaugugcugcuguuaauaugguuaauagaaugaaaaguaccuucaggggaauuuauuuuacgaucacucauuuucauuccuuuaauuuaauuuuuaaaaugcaagaaauuuuagauacuuuaaaacuaccuguuuaccuagaaaguaugugcuaaguaaccugccuaaugccagucaucacugagagacaccaaaacaaaugauugauaguuaacuuuccauuuugcucuuugagaucacguagacaguuuaugcagacuuuacuuuccuaacucaugucauccuguccaagguacugaacuucacuugccaaggacacacaggaagauaaacccucucaaaugugcuacauuugucuucaacuuuuuaaauauccaucuauuuuuuagauuagaugccaucuguuguauuaucauaucugguuaaaucuuauuaaaauuccuggccaauauaucacucugcugcggcaaucuuacccugcuaccucucuaggcuuuucugcagcauucaauaaagagccugcuauuuuaacuaauugcugaggcaggacacagugugagagucuaaaacagaaucagcgcuauauuguuucuacuuuuacccauagagugaacaacuguucauaucaaaccuggaaucaucccuucaagucuccuaaacacagcacaguuugagccaaugcaguuaauccacccuccuucagugcuagugucgaauggcgcuuuugcugcaguauucaccuugaaacuaaguaggcaggauucauuauuuguugaagucaccuaacugccaguuuauucuuauacgaucacaaacaaucacaacagaagacaaauacaggcauauauauaacucacuuacaagggaagcaaauuugcagccagagacaagggcaacguaacagccaagaacugcaguaaaucucuuugagcuaauagccaccucuaauaaugcucuccuacaacaccuccaaucaaauaaauuguauucagaguuuaaauaucaaaucaacauucauuccuugaugguuacagaugauguccgauaagcaaauuugaauuuaugauuuauuuacuccuuaagugucucaaagccaggauuacuggaagacuuacuaugcuuauucaagcaugcugacagaacuguaaucucaguaauuucucccugcaccucucagcaugacugacaggcaucugccaagacuguaguacauaaacugcugaaacaugcaaaaauauuuacccccaaaagauguaguaaaagcucagcuuccuccagcuuccauaaccccugaaguguuaaucuggaggaacaguuccaugaguuuccacaggccagcagugugucuccuacacuu

SEQ ID NO: 3 - DNA, 123 bp, Homo sapiens
gtttcattggtcagtttaacagcaaatgccttgggttactcagaacttggagccatcaaatctctcaggacactaagagctctgagacctctaagagccttatctcgatttgaagggatgagg

SEQ ID NO: 4 - DNA, 6965 bp, Homo sapiens
gtaagaaaaatgaaagaacctgaagtattgtatatagccaaaattaaactaaattaaatttagaaaaaggaaaatctatgcatgcaaaaggaatggcaaattcttgcaaaattgctactttattgttttatctgttgcatatttacttctaggtgatatgcaagagaaataggcctctcttgaaatgatataatatcatttatctgctgtgcttatttaaatgactttatttcctaatccatcttgggagtttccttacaaatctatatacaaaaaaaagctgatgcattattaaagtactatgtgtaatgatataatggtaatctaaagtaaattctatatcaggtacttattctttgtgatgatatactgtacttaacgagttttcctgaaaataatgtgaatcacacatgtgcctaagtatgagtgttaagaaaaaaatgaaaggagttgttaaaacttttgtctgtataatgccaaagtttgcattatttgaatatattcaagattagatggttagatattaagtgttgactgaatttataaaactagtaatactaacttaaagattacatacaaatccacatcatttttataacaataaagtaaaacacttataatgaacagaaaatataattttgactcattactataggtaatttatacattaaccttaacttgcatcttattggtcagagtcacacaaaatgttattttatccttttcaaagatgcaataatcattttccatcatgcataacagattagaaattttgccattattgacttattttccatgcctttttttacggcatgaagcattagtttatagatatataatataaaaaattagttctgcttttttttaaaaaaaaatattatcaaaacaaaacactgaattgtgtgattccaatagaaaaacactgctctttcacctcctaaggtgtagttacttttatggaaactaagctgtattgtagacttccatttgcactttgtagattgtttatagccttatgttctcttctcaagtcttattataaatgtcactttgtaagaacgtaggacttgtcttcgatttccctaacatatatgaaaactttgtcctcattatcgacaactcagaacaatataatacaagtagtcctcttttatttctcacagagagcctcaaattttcaccaaaatgttaacagaaattatctctggggtgtataagaattaagtctgttttccaattaaatgtcactttgttttgtttcagactggcagtttcagttctggagaaaaaaaatgtcatttgtgtacattctacttgaaaacatgttgcctgaatcaaaataatatattttatatggcttgtgaaatctgaacaatgctaaacatttgaaaatattataaaccttttacatttgaccatttgaaagtttattaaattcattggtcaagtgctcagatatttccatacattacacttcatttctataaaaaagctgatcttatcggtatacttttaattttctcagaaataaccatatctataattattaatcaataatgccttttatattaaaagaggttagtttttgaaacttggagttttagacataaaatccttataaatgctgatagtgatataactaatagtttaaatggtcagatttatgaatatggctctattcctcataatgacaacatacacacagcactaaaatgactaatctcttcaatacgtgtttggcattgtagagtcaaaataacgttataattgattctattttttatacttctagtgtttggatattttattttgtaaaaatataatcatgaatgatggtgaggttggatataagaatgatgattatgattgggaagtgagatttgaacatgctcagaaactctcatttaattctttgccctagcagcataaaatcacaatagctgcgtcaaagcgtaactcaggcactcattttatttttgttgttctgttattttttcaaagcatgtgcttttatgcaacattactgaataaagcatgttgtacagtgcttgataagaagttagaaagtaacaaataaattatcatcacgttgcactttgtgttttgcatgttttatgcacatttctggctgacagcttttaaacatttattgtatttcaaatttccagtccaaatttttcaacttgtaaaattaaactgagtgaattgatgtcgtgaatatctagggtaaaataaaatttgtgtttaaatttgtatttttaatttcctaacctaggaaatcttaaataccttctttttcaaaagaactcaagtcttaatggatagggaaacagacggagagcatcatgaacaaaaagtaacaccaaatgttctgtcatatcagatttctaactaataacaaactatatatttctattttgtataggataatcttgctccaacttggatggggtggagcgctggttcctcccctgagccctttattatgggtactgtattaccccttttgctacctttaatccttgcactgtgacttatgtgtagtggggtgagggagggattgggaagggtactattattgcaccacagtagggaaaatacattatttacatcctaatcccctcttttcaattgtcttaaatttcatttgaaaaaaaaaaaaacctttatgaatttaccctctgtggattttaaccccaatggttgatatctttattaagtttcattgaatatgatttagttatgtgtatatggagttatccatctttggggagattactggattggtgagggcgggggaccctggtgtagaatgattatgtgaaaaaacaatttaacttgttaagctcatgatactgtttgaggcatacagcccctgctgtttagtacattggtctgggtcctgaaaattaccagttagataccatcagttgattattgatatgtatgagcagatactagggtgcaatatttcaggtttcataagactggtattgattgtgaccactctcattttttattgtgtaagttcatatggggttattttcaaaatgttaacaaggcaaaaatatattaagaaatagttgaataagcacatgtgaattgtgttgtaaacaaaaagttagaataaaaaaatccacttatttgaattatgcagaatagaatacatacctagaaataaaacaaaaacgtcttatcatgagtattaagataaaatttaaggcataaactcacttcttagaataagtaactcccaactaactttctaggattttaaaacataacacagtgaaaacatacataaacataactctacattttatttattcttaaagtttaagtgtattatacaagaagaagagtttatattcgagagacagaaaaagtcagaatttttgtttggatcaccaatatatcatagcttacaaaaaaactgtcttaattaaaacccacaacataatttttttagatttttaagaaagattctattattcttctttatacttaaaaatggatgattcctactttgcccacttttatttttattcacatagattttctttatttctattagagaagcactagaattcatgaatagtgttgatttgaagttcaaagtaattaattcagataaaaagacatttctgcatgtatgaaaatttctaatgtgaatttgcatatttaattatcaatccttcatttagtgtagacttatttttaaaaatgcaggtaatgaaccagaaatagaattggttgtgctagagtagagaaactttatttgatgattgttttgaaaaaaaagcttctgagaagaaacaacctctagtacagtattaattcattaagatagctcctttctcagacatttcctttcatgtagcctgaaagttcaatttgaaatttgttctttccaatttattcagactaattctgcctactttcttccccccataagaaccaattactgcagctttattgagactgaaaaaagttaatacacctccttctttgctgaaccaaggaatggcttggaactcttgggaaaagacaatcttttctatgatctttcattgtctaatttaatacatcataaatatgactatagctttgtataataaactccccaatactgtgccagatgttttctaagataaagttattttatgttcacaaaaaaaataaaacttttctctgggccaaatgtatgccaactttgcaaatcatatcctgaagtgcactgctgcagagtacatgcttgcgtcataaattccatagagttcgctttaactctaaatcaatccccagtttcaaagtaaacctctcaaacatattacctaagcacaaacttctccctgtgctcagttccttaattattctcatcccatattcagaaataacatttaaaaattatgctttgatcaataaatactaatctaaactttgcttcattaacccattcatttttgtcaaccattattttattcctatattcaaagctctctggtatgttcttatattcaagacactcaaggccctggaagattcacgaacatatgtttgcatcttaaatttttagaaaatcttacaatctgtcaggattacactgaactctagtacagagtaatatgggtaccagataagtgggagcaactcttccacgtagactggaaacagcactaaatgctatttataggctactttctgaacttaacttgttttaacctcatttttctcatatgccaaatgagaacgcaatactgaattatctgtacagttctgttcagtactagaattctgattcttgaattcaaaggggaaaacattcctctttattttggaggctaaactgggggacaaagttaggctccatgaaagaagtgctatttgaactaaagcctttaagaggggagagtatttcagaagaggagctattagacaaggaatttcaatgtaaatggcatctcaatcacctggcaattatattagcacacggttattatattaattgaagtggcatgaagtatagatgaccagggaagttaaaactggaaatatagattgtggagtgatgtgaataccaaggtaagaaaaatatttgttagttaccagagagccaataaataactttcaagtgggacttggggaagattaattcatcttacatagattaaatgaaggagaaggttaggagacagatgacagtgcaagtatgaaataacagagggcagttctaggtggtgactgtgagaatggaaaagaggtggcaaagctgagaaacgtttcaaagaaaaaatgtgagacaggtaatgtgaaaagaaaatcgagaaataggtatagataatcagtgttctgctcatactctaaattgggtgttgaaggcaaaatacgtattttaattagtactctgtgtatacacactagaaacagcattgtaatctggatagtggacaaaatattcagaaaagaagggaaatagtaacttgatttcaatttccaaatctctaatctgaaagaaatctaattctattcatccatttaaaataaattatataacgagaatttatgaagtccattgtattaatgcagacagtcagatgagataaggcaaagtgtcacgtgtcagcttggtagttgcatcggccacatcatttggttctgcctggataactcaaccaaattaatttttcatactcatcccctccacctttgtcattactggtattcttattttctttggcccacttatcacactgttttatgttccccagaaggcctagagttctttacaggctttaaacagggatcagaagtataagaaattggctcatgtatttttttttcagacaggcagttaaaaaaaattgttctaaaaatacactggcatcaaatggcaaatagaagatgttttgacgactacttccattggatcagactgacaagaataatacaagcacataggtggaattaaacttagctattaatgtccaagtttgaggcagctgccccttataagcattttagggtctgtttttagcttccctcttagccactcctgtgcagctccagtgggaggtatggaggaaaaagcaaggaagccatccctatgttgtttccaaacatgaacactcaagatttttaactagtggtccagaagtaaagagggggaaaacatccttctatagaaaaaaaaaaaagtagataataattgaacacagaacttcatgtgatcacatcagatttgagaactatgtatggcatccctctttttcttattttcctaagaaatgatttctattatgtttcatttgaaataagttttttgaattaaactcagtaaatgaaacaactgacatgactggagcttgaaataaacgatgtgatgatctaatgaaatacataatgcaaattgtcttgcttcttatgcaaaaattattagtcatagcaatgcatgaataattaaagacaattatattaggtatttaataatattttttatatttatcatctgaatttttaagttattttaaaaatatattggtcaaatcaactcaggtccaaatgttttagttttgttctttaatatattgcctttttaaaatgagttaaacttctgtataggctttttaacttttctttattctgataacacaattctgacttcatctggcagcaagttcctctgattttccttttcctttaaccttttaatgcttctccctcccttttttttaaaaacatttttgtttcatttcttggttatattgcctatagttgttttcctaagtgtattgcttaagaaaaaaaaatgaattttaagatttttttgaaccttgcttttacatatcctagaataaatagcattgatagaaaaaaagaatggaaagaccagagattactaggggaattttttttctttattaacagataagaattctgacttttctttttttccatttgtgtattag

SEQ ID NO: 5 - DNA, 282 bp, Homo sapiens
gtggttgtgaatgcccttttaggagcaattccatccatcatgaatgtgcttctggtttgtcttatattctggctaattttcagcatcatgggcgtaaatttgtttgctggcaaattctaccactgtattaacaccacaactggtgacaggtttgacatcgaagacgtgaataatcatactgattgcctaaaactaatagaaagaaatgagactgctcgatggaaaaatgtgaaagtaaactttgataatgtaggatttgggtatctctctttgcttcaagtt

SEQ ID NO: 6 - DNA, 64 bp, Homo sapiens
gataatcttgctccaacttggatggggtggagcgctggttcctcccctgagccctttattatgg

SEQ ID NO: 7 - RNA, 123 nt, Artificial Sequence
  Description of Artificial Sequence: Synthetic polynucleotide
guuucauuggucaguuuaacagcaaaugccuuggguuacucagaacuuggagccaucaaaucucucaggacacuaagagcucugagaccucuaagagccuuaucucgauuugaagggaugagg

SEQ ID NO: 8 - RNA, 6965 nt, Artificial Sequence
  Description of Artificial Sequence: Synthetic polynucleotide
guaagaaaaaugaaagaaccugaaguauuguauauagccaaaauuaaacuaaauuaaauuuagaaaaaggaaaaucuaugcaugcaaaaggaauggcaaauucuugcaaaauugcuacuuuauuguuuuaucuguugcauauuuacuucuaggugauaugcaagagaaauaggccucucuugaaaugauauaauaucauuuaucugcugugcuuauuuaaaugacuuuauuuccuaauccaucuugggaguuuccuuacaaaucuauauacaaaaaaaagcugaugcauuauuaaaguacuauguguaaugauauaaugguaaucuaaaguaaauucuauaucagguacuuauucuuugugaugauauacuguacuuaacgaguuuuccugaaaauaaugugaaucacacaugugccuaaguaugaguguuaagaaaaaaaugaaaggaguuguuaaaacuuuugucuguauaaugccaaaguuugcauuauuugaauauauucaagauuagaugguuagauauuaaguguugacugaauuuauaaaacuaguaauacuaacuuaaagauuacauacaaauccacaucauuuuuauaacaauaaaguaaaacacuuauaaugaacagaaaauauaauuuugacucauuacuauagguaauuuauacauuaaccuuaacuugcaucuuauuggucagagucacacaaaauguuauuuuauccuuuucaaagaugcaauaaucauuuuccaucaugcauaacagauuagaaauuuugccauuauugacuuauuuuccaugccuuuuuuuacggcaugaagcauuaguuuauagauauauaauauaaaaaauuaguucugcuuuuuuuuaaaaaaaaauauuaucaaaacaaaacacugaauugugugauuccaauagaaaaacacugcucuuucaccuccuaagguguaguuacuuuuauggaaacuaagcuguauuguagacuuccauuugcacuuuguagauuguuuauagccuuauguucucuucucaagucuuauuauaaaugucacuuuguaagaacguaggacuugucuucgauuucccuaacauauaugaaaacuuuguccucauuaucgacaacucagaacaauauaauacaaguaguccucuuuuauuucucacagagagccucaaauuuucaccaaaauguuaacagaaauuaucucugggguguauaagaauuaagucuguuuuccaauuaaaugucacuuuguuuuguuucagacuggcaguuucaguucuggagaaaaaaaaugucauuuguguacauucuacuugaaaacauguugccugaaucaaaauaauauauuuuauauggcuugugaaaucugaacaaugcuaaacauuugaaaauauuauaaaccuuuuacauuugaccauuugaaaguuuauuaaauucauuggucaagugcucagauauuuccauacauuacacuucauuucuauaaaaaagcugaucuuaucgguauacuuuuaauuuucucagaaauaaccauaucuauaauuauuaaucaauaaugccuuuuauauuaaaagagguuaguuuuugaaacuuggaguuuuagacauaaaauccuuauaaaugcugauagugauauaacuaauaguuuaaauggucagauuuaugaauauggcucuauuccucauaaugacaacauacacacagcacuaaaaugacuaaucucuucaauacguguuuggcauuguagagucaaaauaacguuauaauugauucuauuuuuuauacuucuaguguuuggauauuuuauuuuguaaaaauauaaucaugaaugauggugagguuggauauaagaaugaugauuaugauugggaagugagauuugaacaugcucagaaacucucauuuaauucuuugcccuagcagcauaaaaucacaauagcugcgucaaagcguaacucaggcacucauuuuauuuuuguuguucuguuauuuuuucaaagcaugugcuuuuaugcaacauuacugaauaaagcauguuguacagugcuugauaagaaguuagaaaguaacaaauaaauuaucaucacguugcacuuuguguuuugcauguuuuaugcacauuucuggcugacagcuuuuaaacauuuauuguauuucaaauuuccaguccaaauuuuucaacuuguaaaauuaaacugagugaauugaugucgugaauaucuaggguaaaauaaaauuuguguuuaaauuuguauuuuuaauuuccuaaccuaggaaaucuuaaauaccuucuuuuucaaaagaacucaagucuuaauggauagggaaacagacggagagcaucaugaacaaaaaguaacaccaaauguucugucauaucagauuucuaacuaauaacaaacuauauauuucuauuuuguauaggauaaucuugcuccaacuuggaugggguggagcgcugguuccuccccugagcccuuuauuauggguacuguauuaccccuuuugcuaccuuuaauccuugcacugugacuuauguguaguggggugagggagggauugggaaggguacuauuauugcaccacaguagggaaaauacauuauuuacauccuaauccccucuuuucaauugucuuaaauuucauuugaaaaaaaaaaaaaccuuuaugaauuuacccucuguggauuuuaaccccaaugguugauaucuuuauuaaguuucauugaauaugauuuaguuauguguauauggaguuauccaucuuuggggagauuacuggauuggugagggcgggggacccugguguagaaugauuaugugaaaaaacaauuuaacuuguuaagcucaugauacuguuugaggcauacagccccugcuguuuaguacauuggucuggguccugaaaauuaccaguuagauaccaucaguugauuauugauauguaugagcagauacuagggugcaauauuucagguuucauaagacugguauugauugugaccacucucauuuuuuauuguguaaguucauaugggguuauuuucaaaauguuaacaaggcaaaaauauauuaagaaauaguugaauaagcacaugugaauuguguuguaaacaaaaaguuagaauaaaaaaauccacuuauuugaauuaugcagaauagaauacauaccuagaaauaaaacaaaaacgucuuaucaugaguauuaagauaaaauuuaaggcauaaacucacuucuuagaauaaguaacucccaacuaacuuucuaggauuuuaaaacauaacacagugaaaacauacauaaacauaacucuacauuuuauuuauucuuaaaguuuaaguguauuauacaagaagaagaguuuauauucgagagacagaaaaagucagaauuuuuguuuggaucaccaauauaucauagcuuacaaaaaaacugucuuaauuaaaacccacaacauaauuuuuuuagauuuuuaagaaagauucuauuauucuucuuuauacuuaaaaauggaugauuccuacuuugcccacuuuuauuuuuauucacauagauuuucuuuauuucuauuagagaagcacuagaauucaugaauaguguugauuugaaguucaaaguaauuaauucagauaaaaagacauuucugcauguaugaaaauuucuaaugugaauuugcauauuuaauuaucaauccuucauuuaguguagacuuauuuuuaaaaaugcagguaaugaaccagaaauagaauugguugugcuagaguagagaaacuuuauuugaugauuguuuugaaaaaaaagcuucugagaagaaacaaccucuaguacaguauuaauucauuaagauagcuccuuucucagacauuuccuuucauguagccugaaaguucaauuugaaauuuguucuuuccaauuuauucagacuaauucugccuacuuucuuccccccauaagaaccaauuacugcagcuuuauugagacugaaaaaaguuaauacaccuccuucuuugcugaaccaaggaauggcuuggaacucuugggaaaagacaaucuuuucuaugaucuuucauugucuaauuuaauacaucauaaauaugacuauagcuuuguauaauaaacuccccaauacugugccagauguuuucuaagauaaaguuauuuuauguucacaaaaaaaauaaaacuuuucucugggccaaauguaugccaacuuugcaaaucauauccugaagugcacugcugcagaguacaugcuugcgucauaaauuccauagaguucgcuuuaacucuaaaucaauccccaguuucaaaguaaaccucucaaacauauuaccuaagcacaaacuucucccugugcucaguuccuuaauuauucucaucccauauucagaaauaacauuuaaaaauuaugcuuugaucaauaaauacuaaucuaaacuuugcuucauuaacccauucauuuuugucaaccauuauuuuauuccuauauucaaagcucucugguauguucuuauauucaagacacucaaggcccuggaagauucacgaacauauguuugcaucuuaaauuuuuagaaaaucuuacaaucugucaggauuacacugaacucuaguacagaguaauauggguaccagauaagugggagcaacucuuccacguagacuggaaacagcacuaaaugcuauuuauaggcuacuuucugaacuuaacuuguuuuaaccucauuuuucucauaugccaaaugagaacgcaauacugaauuaucuguacaguucuguucaguacuagaauucugauucuugaauucaaaggggaaaacauuccucuuuauuuuggaggcuaaacugggggacaaaguuaggcuccaugaaagaagugcuauuugaacuaaagccuuuaagaggggagaguauuucagaagaggagcuauuagacaaggaauuucaauguaaauggcaucucaaucaccuggcaauuauauuagcacacgguuauuauauuaauugaaguggcaugaaguauagaugaccagggaaguuaaaacuggaaauauagauuguggagugaugugaauaccaagguaagaaaaauauuuguuaguuaccagagagccaauaaauaacuuucaagugggacuuggggaagauuaauucaucuuacauagauuaaaugaaggagaagguuaggagacagaugacagugcaaguaugaaauaacagagggcaguucuagguggugacugugagaauggaaaagagguggcaaagcugagaaacguuucaaagaaaaaaugugagacagguaaugugaaaagaaaaucgagaaauagguauagauaaucaguguucugcucauacucuaaauuggguguugaaggcaaaauacguauuuuaauuaguacucuguguauacacacuagaaacagcauuguaaucuggauaguggacaaaauauucagaaaagaagggaaauaguaacuugauuucaauuuccaaaucucuaaucugaaagaaaucuaauucuauucauccauuuaaaauaaauuauauaacgagaauuuaugaaguccauuguauuaaugcagacagucagaugagauaaggcaaagugucacgugucagcuugguaguugcaucggccacaucauuugguucugccuggauaacucaaccaaauuaauuuuucauacucauccccuccaccuuugucauuacugguauucuuauuuucuuuggcccacuuaucacacuguuuuauguuccccagaaggccuagaguucuuuacaggcuuuaaacagggaucagaaguauaagaaauuggcucauguauuuuuuuuucagacaggcaguuaaaaaaaauuguucuaaaaauacacuggcaucaaauggcaaauagaagauguuuugacgacuacuuccauuggaucagacugacaagaauaauacaagcacauagguggaauuaaacuuagcuauuaauguccaaguuugaggcagcugccccuuauaagcauuuuagggucuguuuuuagcuucccucuuagccacuccugugcagcuccagugggagguauggaggaaaaagcaaggaagccaucccuauguuguuuccaaacaugaacacucaagauuuuuaacuagugguccagaaguaaagagggggaaaacauccuucuauagaaaaaaaaaaaaguagauaauaauugaacacagaacuucaugugaucacaucagauuugagaacuauguauggcaucccucuuuuucuuauuuuccuaagaaaugauuucuauuauguuucauuugaaauaaguuuuuugaauuaaacucaguaaaugaaacaacugacaugacuggagcuugaaauaaacgaugugaugaucuaaugaaauacauaaugcaaauugucuugcuucuuaugcaaaaauuauuagucauagcaaugcaugaauaauuaaagacaauuauauuagguauuuaauaauauuuuuuauauuuaucaucugaauuuuuaaguuauuuuaaaaauauauuggucaaaucaacucagguccaaauguuuuaguuuuguucuuuaauauauugccuuuuuaaaaugaguuaaacuucuguauaggcuuuuuaacuuuucuuuauucugauaacacaauucugacuucaucuggcagcaaguuccucugauuuuccuuuuccuuuaaccuuuuaaugcuucucccucccuuuuuuuuaaaaacauuuuuguuucauuucuugguuauauugccuauaguuguuuuccuaaguguauugcuuaagaaaaaaaaaugaauuuuaagauuuuuuugaaccuugcuuuuacauauccuagaauaaauagcauugauagaaaaaaagaauggaaagaccagagauuacuaggggaauuuuuuuucuuuauuaacagauaagaauucugacuuuucuuuuuuuccauuuguguauuag

SEQ ID NO: 9 - RNA, 282 nt, Artificial Sequence
  Description of Artificial Sequence: Synthetic polynucleotide
gugguugugaaugcccuuuuaggagcaauuccauccaucaugaaugugcuucugguuugucuuauauucuggcuaauuuucagcaucaugggcguaaauuuguuugcuggcaaauucuaccacuguauuaacaccacaacuggugacagguuugacaucgaagacgugaauaaucauacugauugccuaaaacuaauagaaagaaaugagacugcucgauggaaaaaugugaaaguaaacuuugauaauguaggauuuggguaucucucuuugcuucaaguu

SEQ ID NO: 10 - RNA, 64 nt, Artificial Sequence
  Description of Artificial Sequence: Synthetic oligonucleotide
gauaaucuugcuccaacuuggaugggguggagcgcugguuccuccccugagcccuuuauuaugg

SEQ ID NO: 11 - DNA, 170057 bp, Mus musculus
taaaataaaaaattaattttattagatttgcacattttttaattgtgattagcatcattttgggctaatagtagcattttccaacatgcagttcatgaatacggtttgcctaaatattttttttttaagaaaaagaggtgcctacggtctgcttctgtaagaaacacaaatatcttgatgtaattgactatataagtgtaatcctctctgattttgaggaaaagaaattctgaagcccacatttatatttagaacaatctaaagaagcatgatttcaaagcaaagaaaaataaacagaaattggggaaataaagaaaaaaatgagaaaaaaaagcactctggtcatctgttagcacaaacactacaataaatataaatcaaatgttataccttttccaattgcaaatcataatttggatgtgaagttgtgagtgtattttgccccttaaaattatgaaataatccaaaattaacaattgtaataaaaaagcagagatctaccactacccagtcatagtttcatttcttagttagcaaatatcttccatgaaaaactgctgtggacagaaagtaagaaaagtgattgtgatatcaacctgaagataatttcctcttcatatgtacataatgctgaaaagtaaaagaaagtgactttgtacagtatttatatttgcttataaaactctaaacatgtttttaacaggttaagcagtagtgttgtcttttgaacacgtatgtacagtctggctatacattgaacgttatccacttaaattttaaaaacaacccaaacattgttaaagtgctgcaaactattgcttaatgacttaaagaaatgaagtctgctgaacagtttccttgacttagccactgacctatggtttctcgtgagtgagattctgagtgctgagagaaactagataccgcaacgtggtaatatcgacatgcattggcagcatccacactatctacaatggtacagagtacagtatatttccggtggacagcttgcactctacatttctcgtggtacatatttgatgcaataaatactgtgcttacgtcattatttgtttgctcaaacgtgcaccacagagtaaaatgactatttacataataaatagcatttcattaacacatacagtgtcaaccttgctgagagctgaagatggctaaacaaagtgcaggaggaagcggggatttataaagggttcttttggtcaattcgctctgctagggttgggggtagggagtcagagtcataatttagagacctttcagagacagtgaacagaaatgtagcgtgactccagacatttgaatgaagtttgcacctcctaagacttgatgacctgtctgaacaatctccttggactaaggactagattttgacaaacccagctcagcaaagcccacgatctagcgatcacctccgtaccgccccctccccccgcagaaacacagatgacatagaactgttgaagaactgtctttgctttcctttcgactttttctcatgcatgatcctaaggtgcaacatgccctcatgcgaaaccacaccgttgtgcagacgggagggccataaggatgtcaacactcccaggtgacacaccgggaaaagagttcctttagtctatttcccaacagaaaccctgcttacaaaaatagtcacatgtaacaaacaacacatggattaaaaaaaagatgaatccactaacagagtttgtaaaaaacctgacaaatgtggcagttgaaatgcaaacggtggatagagttactacactaaagtgtttcacattaacccccaaattatagctctgcacccctttagactgatccctacagtctgcatagccatttgtctcttgtcttcagcagtgtcagctggtagttagaacagtaccctcctgtcaaggttatctcccctttacacagtcacagagtttgccgacaagggggtcactgtcttattgaggcactgaccttaaagtgaatttgtgtaaaaacagtcagtttggcattgacttcttaaaggagtccttttgacttcacaggctgtaaacaatttgtcacccaatttattatttttttttgttgtttttgttcatttccctttggctttttcatccttcccttcctgctcgtgtttctccacgattggctttgtcacccgatcgtaggagggcggacaagctgctgtggacattgtcaggtcagttttctccgtaatagagttttcgtttattctgtcaatgagcatgtcttcttttacaagaagattagccccacctttgagtttgttcttattgtatgtgaatgaagcttgttttactgttcgcttcaaaaggtggcgcctataagctcgctgaatgataacagctgacacctcctcttgtttgcgttttaatgtagtagtgatgggctgataagagaccttggaggggttggaagccatgaaccgctcttccatctggattcgaagagcatccatctctccactctcacccaacacccgctttgtaaaagcaaataagatgtccaggcagtggatgcggtctccactcaccatgggcaggtccatggcaatgagctgaagtttgtttggttgtggcaaattgagagggggttctagagcagctgcaaactgagataatttttcaaattccatgaactgggtggcgtcagggtcgaacttctcccagacctcgtagaacatctcaaagtcgtcctcactcagaggctctgcactttcttctgtggcaacgctgaagttctccaggatgacagcaatgtacatgttcaccacaaccaggaaggatatgatgatgtagctgacaaaaaagaaaatccccacagatgggttcccacagtctcccttcaccgagcttccagggttaactttattagggtcacagtcagggggtttgctgttgaggatgggggccagcagtccatcccagcccgcagaggtggtgatttggaacaggcagatcatgctgttgccgaaggtctcaaagttgaacatgtcatcaatcccaacttccctcttaacataggcaaagttggacatcccaaagatggcgtagatgaacatgacgagaaaaagcaggaggccgatgttaaacagcgcaggaagggacatcatcagagcaaagagcagcgtgcggatccccttggcacctttgatcaggcgtaggattcgtccaatcctggccaggcggatgactcggaacagggtaggagacacaaaatacttttctattagctccgcaagaaacatccctgtgggaagataattaaactatcaatcagtgaagaagtcatcaactaatcatttattaaaatatttgagttattaaagttccaatgtcaatttcagagtattaagattcaattttgtaatcttgggtatggtacaaatatattccaatcattttccagtatctgcagctgatttgtcccaggatgcacctctcctccttagaacatcaaaattcaaggactgaaagccctttatatcatatggcagcacatttgcatacaatttgtctataccattttattgaaagttttgaattatatttaaaatgttcatcacatttaacaatgaaagtaccatgtgaagagttgctgtgatattccagaaatccaatcctaactaaacaacaacaacaacaacaacaacaaaaaccaagtaaggctgagtggaggtggatcccagtactcaaaggcagagggaggggatctctgttagtgtgatggtagcctggtctacagaacgagtttcaggacagccaaggctacatagaggaaccctgacttgaaaaaccaaaccaaattaaaaccaaccaaccaaccaaccaaccaaccaaccaaccaaccaacaagaaaacaaacaaacaaacaaacaaacaaaaacaaaaaatccaaaacagaacagttgctaccgttcattatattaaaaatggtcaggagaggagcatggttcttaaaaatacttttgatctgtgtttgaattttcagatatttaatacatacatatggaaaactgagtgtttatagaattatacgatgtataataaaagttaactttagcttttactcagcctcagcaatagattaaaatttaagaatcatagtacagctcgcccccccaagagcatttatttatttatttatttatttatttatttatttatttatttttggtttttcgagacagggtttttctgtgtagctctagctgtcctggaactcagtctagaccaggctggcctagaactcagaaatctgcctgcctctgcctcccaagtgctgggattaaaggcatgtaccaccacgcctggcccgaagagtattgatatgctatggttaacttaaaatctcatcagaaataaatacgaaaatttgcttcaatgtcaacagccaacaatatatgaatatgatgttttttctctaaacttgttgaaccaaacttttctttttcacacttcactaatctgaagtcttggagtgtttcatgctgttttcatcctcatatgaactaatattattacagaattgtccgtgcatgtgcctgtgtgtttgcaaaacactccagggttgatgttcttttcctctcctgtagcaaaatctcaattttttaatttttacagctttttttctccctgtgattttgggttttttggcacatgtatgttcatgtggcatgtgctctctctctctctctctctctctctctctctctctctctctctcgtgagtgtgtgtgtgtgtgtgtgtgtgtgtgtgtgtgtgtgtgtgtgtgtgtcttacctgaggctgatgctgggagtctctttgattgctttctactttatgtatttattttcaatttttaaaatttttattggttattttatttatttacatttcaaatgttatcccccttctcattttcccctcccaaaccccctgcctctataagggtgttcccccaccatcccatcaactcccacctcagggccctagcatttcttttgcggggtcatcgagccatcacaggaccaagggcctccctttccattgatgaatgacaaggccatcctctgctacatatgtggctggagccatgctccatgtgtactctttggttggtggtttaggccctgggagctctgggagctttgggagctctggttggttgatattgttgttcctcctgtggggttgcaaaccccttcagctccttcagtccttgccctaactcctccattgcagtctctgtgctcaggacttctcaattgaacacagagctctctggtagcttgccagataatttgaggggttccaagagccttctttataaggtgtcacccttggccaggatttacactggtgctgggaatctgttctctcgttctcaagcttgcacactaagtgctttagatgccactgcatttctcagctcccccctctgtcctttaaataaagactccattaaagagtacttccaacacaaacacacacacacaccaccaccaccaccaccaccactaccatcaccaccactatcaccaccaccaccatcatcaccaccaccaccatcaccaccaccactgccaacagcaataacaacaacaaaaacctacctattcaaccaaccaaaatacccaaatgcatcattgtatgcaaagcacaaaagcatcattctctttagtcagccttctctatctcagtctctatctctgtctctttcggcctctctctttttgatgctatttacatgattattgttggaattaaaaattacatataacatatgggttggattttagatgtaaggcctatttattcagaggggggaatagcacacagatcattccaactgagtcctatgcttgaaaatttgcaatgatttcatcttaattaggaatgaagttcccatacagggacttcttcacttctctgaagcattgttggtatctgcagtgagatgagttaccttcatgaggctcttatgtactacacaatttgtaggataggactaagaaagagatgttccatgctaccagtttccttctggaaatattgaaaatttctgtatgaaagccacaagaaactactgttagtctacttgcatttcccatttacttctatccatgttctactctgcatgctggtgaccccattaactacatctctaatgtaatgtctttcctgaccttcagaccagattctcagtacccctcttaccagaatcatctagatcagtggatctaaaccttcctaatgctgcaaccctttaatacagtttctcatattgtggtgaccaccaatcataaagttattttgttgcttcttaataattgtaactttgctactgctatgaatcttaatgcaaatacctatgatttctaatggtcttaggtgacccctatgaaagggctattcaatccccaaagtgttgcgacctacagattgagaatcattgatctggatagcgtatagagtgtttaatctcaaccacctaaaagcactttttaaattttggttcaccacatcaatctatttaatatatctcaataaaggagatcttattaatggtcaaataaatatgtgatgcaatgggataaaatatttgtataaattagaagcctaattttggaagaaaaacaaatacaactcaaaaacacatgccaacatattgactttgagtagtgagatgccttccactctaaattcctgttttcaacctccacttttatcaggaggaatttgccagactttgcacagatcttacctacaatggagaggatgaccaccacaaaatcgaaaatgttccatccaatggtgaaataataatggcggagcgagatgagcttgagcacacactcgccggtgaacaggacgatgaacaccaggttgatgcgtgacaaaatgcttgtcacataatcgctctggtcatccgtttccaccatcatggtcaccatgttcagacagatgaggatcatgatgctgatatcaaacacttgtctggttacaaagtcaaaaaccattccttgaaatttgttctgcagagaaacaaagacactttcagcaatgcgggagattcctggtagacagcatatacattaaatacttcctatattccctactttctagtattgtacatagtacctacctattgggacaaatatttgtaattggtgccttgtagaacatttttatatctagttaattaaatttttgttttgaggcatgcatattcctgaatacatcaatcccttgctgtagattctttccctgcacactctttacagaaacacacagtgaatttcaacacatcaaggttacagaactgtaagaaatctgtttgatttgctgttgccaaactttggctcactggctgtagtactttccaatgagcagctagacaatgtggtcatttataaacgtaataaatattagtcttaaatttgctttgttcctagagaattatcaaaggaaccttgtgatttcaaggatgcatctgaaacaccaaacatttacattcctgctgggcaagtagcacttggggggtagaggcaggtggatttctgagccagcctggtctacaaagggaattccaggtcagtcagggctacacagagagaccctgtctcaaagagtaaaataaaataaaataaaataaatttacatttcaccttgacaacattaatttgttcccagcaagtggtctttgctgatattgtcagacaaataatgatgagtctccacaggggtaatcagactgaaaagacattgcttgctatgctataacaaagggagcacatgtccttcgctactcatgtgtagtcagctgaggttaggcccagtacaccatcttctgcttatttctttgggccactgaagaatcctaagcatattttagtaccataaaatacccctgctgtgcagtacttgacttgtgtagcactaagtatcaatggggaaaatgttctcattagacactttgcctcttcttagaactgggaacaaaacacccatggaaggagttacagagacaaagtttggagctgtgacgaaaggatggaccatctagagactgacatatctggggatccatcccataatcagcttccaaacactgacaccattgcacacactagcaagattttgctgaaaggacccagatagagctctctcttgtgagactatgccggggcctagcaaacacagaagtggatgctcacagtcagctattggatggatcacagggcccccaatggaggagctggagaaattacccaaggagctaaagggaactgcaaccctataggtggaacaacattatgaactaaccagtaccccggagctcttgtctctagctgcatatgtatgaaaagatggcctagtcggccatcactggaaagagaggcccattggacaggcaaactttatatgccccagtacaggggaatgccagggccaaaaagtgggaatgggtgggtaggggagtgggggggggtatgggggacttttggtatagcattggaaatgtaaatgaggaaaatacctaataaaaatattaaaaaaagaaagaaagaaagtagtgcttgaactggacagtagtagagcatgcttttaatcccagcactggggaagcagaggcaggtggatctgagttcaagaccagcctgatctacagtgtgagttccacaacagccaaaactccaaagaaaaaccctgcctccaaacaaacaaacaaacaaacaaacaaacaaacaaaattggctagtacaatagaaacattcactaagattctgttttgtaattcatcatggggaatattttaagcttaagatcactgccatagtcaaggacaccacaagaagacctacagtgtcaactatcctgggaccgtggagactcacaaagcctgggccaccatccagggagcgtggtggagctggatctaggtaccctacacatttgtagcaagtgtgcagcttgtcttcatgtgggttccctaacaagctgtctcagtctctgcttcctgtcactggagccccctcctcttacctagactgccaggttagtccttggtgggagaggatgtgtctagttctgatgggactagatgtcccatggtggagtggtataaaagggggatccccttctttgaggacaaggggaggggacaataggaagaaggatttgttgtgatggtgggactaggaagagaggagggagggaggctgtgattgggatataatgtgaataaaagaaataagttatggaaaaaaatcactgtcataaaaataaccatgataagggctctttctcctttatagtttgtagatgaatcttggaaatatgagaatggttatttattatcacaaattgtaataatgccgacataagcaattgctgattttagagccatacaaaaacatattcattactgggatgctcacctcctctaaaatggtccatatttctacttattaaacaacaattacaagtggagatgatatgccattgagcatcttttctacctctttaatcagaaagtaaatgaatattagccccaccctatgcttctgtattgcttgacattgcactgcagctactgtaaagtcataaagacacaactattgtgaggaccacattagtctacgtagtttggattctaagtgtgtagttgtaggtcatttggagacaaatttgcattttctgtatattcttattctttttggtctttaaaaaaaatatcaaaacatagattagagatactcaaaaggttttttttttcctttttcttttttcttttttcttttttcttttgtgctgggaatggtagttgatttcccctgagaaacaaaactcatttcaggttgttgctttatattattttcatttgatatttcttactccaggtcgagggataggcttttgtggcttttttgatcctaatttcttcattgcattatagtatttcttctgttcttctgtcataaagatgtcttgacctccaaagtatagaaaaaaaaatcaaagctggttaaaattgtatccattccctcataacttttcaatattataacaagagatttcaagagattaacatggttatccttgtgacttattttgaatttgaaaattaaaagtacactgtattgactataatacttaagttttaagataactaaaattggcattattattataattattgaaggaaaaaagcccagacatggtaaaacacaaagctccatcttccttctggcccacacttccacctacagtcagggaccagcaccctgagctctccttcacaacctgtctgcctcatgggagttcttctcccaccagaacaaccagctccatgtttcagtccacacctctacctgcaattggggatctataccctacacctcagccaacagctctgcttgcctctggggagggctttagctatctaggacaacaagtctctgagagttactactcccaaggacttacaggccagccaacaccagagaaaaaaatagatggcgaaaggcaagctcaatagaacaatagaataatcgctagaagccagtgcagtatggcaccttcagaactgagctctcttactacagcaagccctggatatcctaacacacctgaagagcaatacttgaccttaaatcccatcttatgaagacaatagaggccattaaagatgatataaataaagcatatgcagaatataggaaaatacaactaaacaggtagaaatctttaatgaggaaacaaataaatcccctaaagaaatatgaaaaatacaatcaaacgggtgaaagaaatgaataaaatggactcagatttaaaaatagaattagaagcattaaagaaaacacaaatggaagcaaccctggagatataaaactgaggaaagagagcagggactacacacataagaatcaccaacaaaatacaagagatggaagaaagaatctcagacagaggaaatgcaatagaaaaaaattaatacattgataaaggaaaatgccaaatgaaaaaagttcccaactcaaaacattcatgaagttgtgatacgatgaaaagactaaacctaagaataatagaaataaaagaaggtgaagattcccagttcaaagggctaaaaaatatcttaaacaaaactatagaagacaactttcctaacctaaagaaagggatcactatagaagcttacagaacatcattagattggaccagacaagaaaattttccttccacatattaaaacactaaatatatagaataaaagatagaatattaaaaactacaagggaaaagggccaagtaacatataaaagcatacctaatagaattatacctgacttcccaacgaacctctaaaagtcagaagatcttgcagatgctaagagactacagatagcagcccagactattatacccagtaaaactttcagtcatcatagatgaagaaaccaagatattctatgacaaacccaaatttaaagagaatctttctactaatacatcctataatggatactagaagaaaaactccaacacaagaagagtaactacacccaagaaagcacaagaaattaatcatcttacagtaaaaccaaaagaagagaatcacacacacacagaaccaccactaacatcaaaataagaggaactaacaatcattggtcattgataaatttgagtatcagtagactcaattcaccaataaaaagacaggctaacagacacgtaaacaatttccatcattttgtggcatacaagaaacacacctcagcaacaaaaaaagacactacctcagaataaaggcctcaaaaaaagttttccaagcaaatgaacccaagaaaccagctggagtagctattttaatagctaataaaatagactttcaaccaaaattggcaaaagagatggggaaggacacttcatactcatcaaagggagaatccactaagatgacatctcaattctgaacagctatgccccagaagcaaggaaactcacatttgtaaaaggaactttactaaggctcaaatcacacattgaaccctacacaataatagtaggaaatgtcaacatcccactttcaccaatggacaggtcattgaaacagaaactaaacagagaatcaatgaaactaacagaagttatgaaccaaatgaatttaacagatatctaaataaccaccccaaaaccaaagaatgtggcttctactcagcacttcatgagcattttctaaagctgaccatataattgggcacaaagcaagcctcaacagatacaagaagattcatattaccccttgcattgtatcaggtcaccagggattaaggctagacttaaaaaaaaaaaagaacaacaacaacaacaacaacaacaacaacaacaacaaaaacccagaaataacagaaagcccataaacttatggaaactgaataactctatactcaatgatcactaacttggtcaggaagaaatagagacagataccaggtgccaaagttaaatcaggataagaataaccatctacacattcctataacccctaaggaaatagaagcaggcattaaacttctcccaaccaaaaaaagtacagggtcagatggttttagtgcagaattctaccagaataccaatgctcctcaaactattccacaatatagaaacagaggaaacactacctagttcactctatgtggccacagtcactctgatacttgaattacacaaagactcaacaaagaaagaaaactacagaaccattttgtcaatgaaaattgatacaaaaataatcaataaaattctcccagacccaattcaagaacacatcaaaaacatcatcaccatgatcatataggcttcataccagtgatgcagggatggttcaatatgtaggaatccatcagtgtaatactagtactccccaaattcttccaaaaatagaaacagaagaaacactacctaattaattctatgaggccacagtaaccctgatacctaaaccacagaaagactcaacaaaggaagaaaacttcagaccaatttcacttatgaacatctacgcaaaaaacactcataaaatattcacaaaccaaattgaagaacacgtcaaacacataattcactacaaccaagtaggcctttcatcacagggatacagggatggttcaatatatgaaagaaaatctatcaatgcaatccactatacaaacaaactgaaagaaaaaaatcacatgatcatcacattagatgctgagaaaacctttgacaaatccaatactcctttatgttaatcataataaataaaaaatgaatgcaacgaacaaatagtatgaaatcatgggacataaagaaatataattggctgggatgaacttggatacatccaaaactatttgccataaaatgcacaaaaaataaagttaaattttgtttccctttaagagatgtcaaatattaacaactaaagggaatgtctggtgtctgtgagagtggtggagcaaggtcatgctcacatagcttattcagttgactagttatttaactacaaggaggcaatatacttcactctggaatttaatgtaagaaaagatttaaacactcaaatgttttgcaggaaaaaattacttaagtcactaaagattagatagattgaaattggccaagttatgataaataaacatgaacacttttaacaaactgagaaatctctgtgataaaagtatttaaaattgtacattgggaaacatttcagggctgggaccatggcttagtgcatataggcatttgcttacaatccaaatcacctggattcaatccctgggactcaaagggtggaaggagggagaccatatcctgtaagttgtctactgactaccacacacccagtgtggcatgaataaataactgtaattttaaaaagtatttcagagatggctgaagtgataaatttattacacattggcgtgaatataagctcagatcccaacccccatgttaaagtgggcatggcactatgttattaaaacaaaaaccaaatggtgatggggatgcagagataagatgaatccattaatctcactggccagccatcaatctgaattgaagaggagattcaatgagaactcctgtcttaaaaattatggtgggtagtgattgagaaaggtgactaatgtttatcactggcttttacatgcatgtgtacattcatcctcacagacacttgcacacaccaccacgaatacacatacaacacaacacaatacaacaacacacacacaacacacacacacacacacacacacacacacacacacacacacacacacacacagagccacatatgtacacagaatatttcagggtcagacaacgtgatatgtgactatagttccaatttatttgagaaggatacagggctgctacttgttttaggtcacatagggccatatagtgagatcaggtcagcctagattgaaaagtgagaccatcttaaaagaaaaaaacagatgagaagtagttcaaaaaaggagactgttcatggaaagagtttgagcagacaaagatgaaatgtggaccattgttactactgagtgataatatttgcatgcttcctttagtgcacatatataattgaaataatcaaacatgccttaagaatgataatagataaaacaaaaattcctcaaattagaactagaagtggttgctattaattaaataaccagaagaaagaagtacaggtagaaaagagtacaaaagaagtatatacactgaaccgtattttaaatgatggataattactgactatgtataatcatgggatttagtgtgatattgtagtacagacatgccagtgttctctgatcaaatctaaccccttttccctcacctttccacatgcttttccagcctctagtgatcttttagctgcgaataccttataaaggggagtgagtgaggagttattaaggataaaacatagggaaaaggtcgtgagctatttggtttctgaattcaagatctcatcttgaattccaattcaaatagaatgttaattactctgattccttgtgttaggaaaaattgtaaaaatacttatcttcttcttttgctggttgaaattgtcgataatgacaccaataaacaggttcagggtaaagaaggacccgaagatgatgaagatgacgaagtacaaatacatgtacaggctttcctcatacttaggctgtagttcaacctgccaacggagggaatttgttaactgataaagcagtttgaatactgggagcaagtcggtgcttctacacaagagtagaaggctatatatattcttagaaataatttagtgtattttattcccatatcaacagcctcaaagaaacaaaaaaccaaaaaccatccttgaaactaggaagcaaaaagtttttgtgtaaaaagtgatgcaattcgtcactctaacactaattgcataattttacatagtataactgacattctgttatttggataatagactttagatttggtaagttttaagttaattgattttcagtaatttgaaaatactagtgtggtgtcttatgtctgtgcaactccagaatttgggaagctgaggctggagacttgttgagtactattctagcctgggccacaatgcaacatcctgtctttaaaacaaccaaagaaaaagttagtgaaaaattagctcttataaatatagagaggacacttttatagtcaagattcacttgtgtatgaacttatatagcaaatgaaggaactgaagtattcatttggatgctggcatcttgccctaccagtaacaaagtcattaaaatttttggattgaatagacacgttcaatgatttattttataaaatcctccattgacgactgactctcagacttgcagttataaaaatagacacagggctgtcactcaatgcataacaatggagtcaatatttagtataaataggtaactactgcagtcttctatttttaaagacaacagctaaaattaactgaacatctaagacaaactctatgcaacaaggtgagatgatgcaattccagaggtgatcaagaagtttgtaggggaacaggacgatttcaaatttatcattgtctccatagtaagctagaggtctgggttaccgaagaaaaccaaaacaagaacaagaataaaaaaacaaaaacaaaaaacaaaaaacaaccaagtaacaggaaagaagaaaacagagattttacagttttggagatcaatcttagaggaagcctgtgatttttgagtacatctgaaagctaggaaaagtatggaatcaataaagtagaaatgataacagtgttggtacataggaaagctaggaaaagtatggaatcaataaagtagaagtgataacagtgttggtacatctgaaagctaagaaaagtatggaattaaaaagtagaagtgataacagtgttggtacacactccagtgaatgcatgggtgctgttcttataaaggatggatttagaaaagactatgacacatttctaagatgtttagcctgcatctttagcctttcaggcttcaaagcatggagcctgcctacacagttcagctactgaagacagtcatatattcttctatgtcctttatacaacaaatagaaacactttggagaatatctgttgcttattaaatgaaagagttgaattttttctttcattttttgacttccatttttttttctgaactcagtacaatatctctgatagacactgctgtgttaagtacaaactcaatatactgtcttcctattttttaattaactaaaatggagttagtttgtttggctaattcataagctaatttaagcaccaaatcaatatttccagaagacattggatataaaaaatacttacatttctggaatcaactgcagcatacatgatatccatccagcccttaaatgtggcctgttggaaaggacatgcatgccttaatttgggttaaatttcaaaactgatgcttactaatatccttactgtacatgtttaaagaaatattttaaactattttcaaaacaaactttccttggattttgaaaaaaagatagaaagccaacaaaatggcgatctgatataacttcctattttccaaccagctctaaagtaactctcaagcttaacattctattacaatttggaagaaagtcctagaaatgtaagtggacttggcagtgtctacagcaagaacaaattagatctgcgatattctgtgggaatctcgtcttctaggtgatcaagttgacagtatttaaggtttttctttatgcttacagtgtatggatcatatgggcataaagaaaaaacctgaagctattcttttaagaatttttcagaaataacactatattcattttctatggggtaacccctgaaaagattgtgtaaatataattaacaacataataaaagtgtgacaaaataggactgacacttgtcatttgcacattgatgagggattcctcctctaacctcttgcaggcatttgtcatgtgtcttagaacacaagtttgaggctacaggacctgaaatatatattccatagtcaatgaggaagcctcgcatatttttgtgatttatctttgtatttaaatcattgactcttggaaaatgtgggagtgtgaccagagactaatgtatcttagtcagaaaacggaaattcttttcacatcaaagagagagatgggtgatgtgtcagtggcttagaccaattatagaacctgtctatcacacacttcctacaggaacagaaaagtgatttgacctatttctatgaacttactcatcaacagagaggtgggcgaaatagtcaagtgtgaaatttttacttagtagcagaacatgtttgagagttctgtgcacttatctggattcacaaatttgtactaacagatgataatgctgaaaacatattataaagtttcttcctaacaaaataacagctgcaataatcactttgttattattctgagcaataaaaattttcagagaaaatagtgttcacttacaacttgaagcaaagaaagatacccaaatcctacattatcaaagtttactttcacatttttccaccgggcggtctcatttctttctattagttttaggcaatcagaatgattattgacttcgctgatctcaaatatgtcaccagttgtggtgttaacacagtggtagaatttgccagcaaacaaatttacgcccatgatgctgaaaattagccagaatataaggcaaaccagaagcacattcatgatggatggaattgctcctaacagggcattcacaaccacctaatacacaaatggagagaaagagaagtcagaatccttattgattaaaagcaaaaagacatccccctaggaatcattgatttattttctatcaagactacttatcctatctgtgtaagagcaaagcagaaataatcttaacataaaactcagtcttttttaaatattatgcttaggaaaagaaatataggcaatatgcaaagagatggagaaaagaaagaaatctaatataaaaaaggtgctaaaggaaaagcaaaatgggagaagttagctcctggatgaagacacatgtgtagtttattagaaaaaataaaaggaggagagagaagtaggaactcctaggcaagagattagctcataaaaaaaaatcccaaaacaaaacagtatctcaaagaatagaactaaaacatttgggcatgaattgattggaccaatatactttaaatataaattaaaattcagatgtataaatataaaactatttttaacatctaatatatttttggccttaattatccatgcattgctataactaatagtagtttttgcataagaagcaagacaatttagcatcatgtatttcagtagatcatcacatcgtttatttcaagctccagtcatgtcagttgtttcatttactgagtttaattcaataaacttatcttaaatgaaacactagagagatcattttctcaggaaaacaggaaaaagagggatgtcatacgtacttatcaactctgatgtgactgagtaaagtcctgtgctaaaatattttctccattttctaatgtcaaagatatttccctctctcttgtccttaattcgggactacagatttaaaatgggattttttttttttatatttgacatatggtagtcttggcttccttctctatagctcaccattgaactgcacattagtaactaagagggagataaaggctggccctaatgtgctcttaattggcaagtgtgtttcagacttgaacatggacgtcagattaattctactcatgttgggggagggggggcctgccacttttgttagtttaattatgaatatcatctctttgatttttattatagtataattttagaagtttttgcctgtctgacagaagtataagagccaattccttgtacttctgagccctggctgaactttgtaaggaacaatatccattggggaatacaaaatagtgggctatgtggccaagggaaatgaaaccagtaacaataaagatgagggatgaacatgaagaagataattcagagtgcgctatcaaggcagaagccaaagataggctgatgtgtagaaattaatgagcaactatctccctttatggcctccctaaaaaattagcacacaggctttcctgtatatattactttttaaagttattttcaatttaatttttaaattattaagaagagatttaaaaacattttaatgtaattttttaaaaaattgtacccctaaagttgtttattggatttgagatatgaacactgaaattgagtagttgtttctcatttctgaatacttcatctcccactcacagtgaggtgctctgtctgccgaggatatgaaatccatactaacatgcaagcttttcacttttaacactcatgacactgaacattttggtacaagtctgtaggtttcatgctgcttccttcaaacctttccaccttggccattggccctgttctctatcttcgctctgtcctcggttactaagaattacattcttatcagattttatttgcttgccttctttcagtatggatactaaatttatctatcccatgtcccattttgaaaaattccttaatggttctctagccattagaaaacatttctctttctttggcatttacatcactcgacagtttgtgaggttattttcctcaaaacagtttgcaactatgtttatttgtgtgtgcatgtgggcatgcatgcattttctatagcacttgggtggaggtcacaggaaaatttgcaggaattattcctctcctttccaccatgtggggtcagttctggggattgtgctcaggtgctagacttggctgctgaaggattctcacaagcctgatacatttcccctttcagcttccctaactggtgacatacacttcaccctcctctgtgacagtcactccacgctaaggtgttagtctgagaattgagagccttctttctttgaaactccctgccaagtacttgcccttgaaataatctccctcctccaggctttagctcaaatatacatgtcgtttattgagtctaactctacacatccttaacaaagatgagagtgtttgccttcgaattgaggaattataatttagtactggaaagagcaataaggacaatttggtgcttggggttcatttggaaaattagactaatgaaggtaaaacaagttaggttcagaaagtagaccagaattggcatctcatactcttttctgtttatcctgcaagttttttcaagagtttcaacctcttatggttttctctgactgctctgtgtgaaagttaaatattttcttatattccaattgttagattatgatgcttcaatgtgtcaagtgtacatatgtgtgcaagtgtgcatgcacatatgtgagcatatatgtggaagcatagagctgtatgggaaatacatgtatagatgtagaggaaagagatgtaggggtcggggggggggattctttcttatttattgcaccaactgaattcagagcttgaggacagggctagtttcatctttctagctctggaattacatgtaagctactatgcccatccgacatttctgagggttctggatatccaaattccagtcctcatacttgcctggctaaggatttaaccactgcataagaaagcagtttgcataatgtaataaatgggagagatttcctttgaagaagggactggttttgaattaaaagtaatgcccattagtgaattcaggatggcaaatactatataggaatgcagttcaggaaaacgtgcaaatttgccatagatttggcccagtgagacatttattttacaaggatgtttgtcttagagaacatttggcataggatcagaggatttgccactgaaaatccacttaaagttgcgatttcattaacatccagagcaaaagatcacaaacggattgcctctcccaagagcccaaccatcccttggttctacaatattaattctttgcagtctctagggagagtcagtaattggctcccatgtgggatgcgctgggaagtgttggtctaagtcaattggaaagaacacattgaggttataaggtacataaaaggagatgtctaagagagaagtatgcttaatgggtggattgtagaggttgtctcttctaacaatgttttaaaaggacatctcccagcagaatttctgtattgtcacacaaccagttcttcaagtctatttcttctttagggttcatactttttattaaatcagtgaaaaattaggaccaggcaaatattcttgttgatattagaaatttcagtgcatttgaaagtatcatctaagtgaagacatttagattagttttttaagtcaccggaaaccatgggttctatagcttttctaagaaatagagaaaaaccatatgtgaataagaatttaaaaaatggaaagtaaaaatcatgagttcttaatatgaaatataaaaaatttttagaaaagccaacaactaaatcagtgttgtgaaattttattaagataaatatttttgatagataaatgcctcaattatccaaacaatttttttttcttccaaacaataaaaattatctttcttatccaagactcctacattttaagaggaagcagaagtgtcagtttggctttttattttggggtgcactgtgatgccttctaagattctgggaagttaattggggtagcttacaaggagttggcttatacaccaatttcttagtgctcatgatttttttgtttttcatgcatatcctattctttatacttcaatgaagttgacttttcacatgttttggttttataacttaaagcacatctttttttttttttgtattcccttgtttcacagggatcttgccttgctactttctgcaaataacacatttttatgcaataaagatgagaatgatcataaccattggcaaccctgagatacctggcctgttgtacctttagccactgctcgcacacatcaacgatcaactgatggaatgtgactggcccattgagggaccagagcagtgtgttgaaaaaataaggactatatgctctgtcactaccatgagcttgacaaatgaaaacgttttcatcagcatcctacaccagggtcccccaccctcaccaattgagtaatttccccataaatggacaatgaagtataaatagctaaatcatattcagtgaaacgtaataaagatatgtacttctggggttataatccacagatggtaagtcagagataactttttttttcccaaaagaagtttaagctcattaaaagtagtggatttggaaataaatcctgtattgtccctactgtggtgcaattgtacccttcccactccctccctcaatcccactacacataagtcacagtgcaaggattaaaggtagcaaaaggggtaatacagtacccataataaagggctgaggggaggaaccaccgctccaccccatccaagttggagcaagattatcctatataaaatagaaatatatagtttattattagttagaaagctgatatgacagaacatttggtgttactttttgtatatgatgctcactgcctgtttccctagcaactaagacttgagttctttggaaaaggtttttacgattttcccagcttgggaaattaaaactacgaatttaaatacaagttttatttgaccctaggtattcacgacatcggttcattccgttcaatttcacaagttgaaaaaaaaatttggactggaaatttgaaatacaataaatgttcaaaagctgtcagccaaaagtgtgcataagacatgcaaaacacaaagggcaacgtgatgataactcgtttgttactttctaactccttctcaagcactatgcagcatgctgtgtttggtagtgttgcgtagaagcacatgctttgaaagagtgacaaaaaacccaaaacaaaatgactgcctggttgacactcggacacagcgattgcggttctatgctgccaaggaggataaagtgagagtttctgaagatactctagctcacttcccgcttacaatcatcatcatgcccaacctcgccgccatccacagttatatactcttacaaagtagaaaatgtctcatactagaaatacaaaaaccagaatcaacagaaggttggttttgacttcacaatgccaaactggtggtgaggaattgccgtgaccttgagatatttgtggtctcactatgtgccaagctgaccaaggagtcagcttcgtaatatctacccagaatttttgttttgatgactccagttttaaaaaagagaagcatatcaacaataattgacaaaagcattattaacaataattgataaagttatttctacacaaaaggaaaatagactcatttgttatggaaagtcaatattacatataaaaaataaacgactggatttaataatattctaaaagatcaaagttgaagtataatctaacaaccttatatacgtagcattattcattaaaggcctgacactattactgatgttatggtgtgctgcttgtaggcaggagcctagcatggctgtcctctgagcccctaacaacagctgacagagacagatgccaatatttacactcaaccattggactgaagtctggatacctgtggttgaattaggggaaggattgaagaagttgaaggggagggtaactccataggaagaccagcagtcccaactaacccagaccccagggagcttccagagactgagctaccaagcaggaacatacacaggctgggcagaagcagaggactgcctggcctggtctcagtgggagaagatgtgtataatccttgaggaacttgaagccctggggaagagggaggcctagtgagggagggagcatcctctcagaggcaagggggaggaggaatgagatgagaaactataggagggggacagggaggagaggtaatggctggattgttaaaaaatgcgaaagaaaaagaaacataaaaaaaccataaaaagttgaaaaatgtgaatttaaatttagctcatgtatttttatataaaatgtataaaaacaatgttttccttgacaactgaaattgctattctgaaacgaaagtgctcttttaattggaaaagcatttaagttttgcataattgggagaaaatttatgatacatttttaatacaaatgtgatttcttgtgtgagaatcaaagctcctttgtgcttacttggatctactgaagagaagttttcatatgtgctagagaaattaaaaattggacaggtttcttacagtatagtataataaaatttataataggtttttatggggggacacaggctgaaagccctctatgtggtgcagagaggagcctgtttgttggagccttggtttgtaagtgtcaggacaatgagcactctttgccttatacatttcatctgattggtttaaagagcgtaaattttggatcttaataaaaaaataattttcacacggcacatcttctataaatgattgtataatgctttgaaataatcatcataacaatgagccaataaatgcaaaaatctgatacgtgttgaattatggagaggggaataatgctttgctcaaaagagcaacataaaactctgtgtaactgagaaccgaggtttaagttaaggttgacgagccatgtatggcaatgaataaaaatacatgttctttttccttatcagctgtattgtcataagatgtgtatgtatttatagtaattaaattagtgtcttacttattcaatgtcattaatttagttacagttgaggcagtattattatactccagtcaatggttaatatctgcccttggatatattcaaataatgagaattttggcattgtaaagacaaaacatttaacaattcttcattttttcctttgtattcatacacatttgtgattcacattactttccataggatcccttaagtactgatgggctgtcatagaggagaacgatatgaaacaaaattatctctaggtaattattacatgactcaacttagttctttaagagagtatctgcccctccccctttgtattaggaattataaggaaactcccaagatcgattatgaactaaggtcattttaattagcaaagcagataaatgatattaaatcattttcaaagaggccgattttctcttgcatatcaccaagaagtaaatatgcaacagagaaaagggtaaagtagcaagtttgcaaagggttgccattccttttgcatgcacgtgtttttcgttagttaagttgaactcagcctagctttgacaatatacaacgctgcagagttttcctttttcttaccctcatcccttcaaatcgtgataaggctcttaggggtctcagagctcttagtgtccttagggatttgatggccccgagttcagagtaacccaaggcatttgctgttaaactgaccaatgaaacctgtacaatacaaataacaatgaatcaataacaccgctttcgtccaatttgcagttatcaactaatacaacagataaagttttattcatagctgttctgttattctactgaataaacacagcaatagtgactcctaatgatgaacggctttatccatagatcactgccccacctaaccctcgccagagaagctctctcttgcagtaggtgatggttaacagggacccacaactggacagtgctgagtgagagtccttggaaagctcagtactaaataggatatcttcatgaaacccctcctctcactccttagagagctatgtggaagaggaggctaaagagtttaagagcacttgttggcatccacaataatgtctgggtttggtagctgtatatgggatggatccccaggtggagcagtctctgggatgtcaacaagtgcttgctgacaggagcctgatatagctgtctcctgagaggctctgccagtgcctgacaaatacagaggtggatgctctcagccaaccattgggctgaacacagggtccctagtgaaggagttagagaaaggacccaagctgttgaaggggtttgcagcaccctaggaggaacaacaatatgagccaaccaggacccccagagctcccagggactaaaccactaaccaaagagaacacatggtggggactcatggctccagctgcatatgtagcagaggatggccttgtgggacgctgttcctatgaagcttctataccccagtgtaggggaatgccagggctaggaagctggagtgggtgggttggtaagcatggggagttgggaagggataaggggttttcagaggggaaacaaaaaaaaaggggataacatttgaaatgtaaataaaataactaataaaatttttttttaaaaaagtttaagagctagaggtggggagtgactccaagaaaattagtgtcttccagatacaacagggtgagggacatatgagctcacaatggtgacagacttgacggacaagacttgtggaaaatttaaactggactaaattgtagcgtgggggaggggaggtgagcaggaagtttttacccctaaccaagatgctatttgataatgctgggagagaaaaatcagttttcctcaagggagtgacactgggtatatgaaccacactcagggcagtctgcaagagcagaagtagctggtctacccaaatgttctcgaatttgatttttgtttgtgtgctcttattttgttgttattatggtttagtggttggttgttttcgttttttttttttttgttgttgtagttttttgtttgtttttgcttgtgttttattgcttatttttttattttcttttttcttccctttcctttcctttcctttcctttcctttcctttcctttcctttcctttcctttcctttcctttcctttcctttcctttcctttcctttcctttcctttccttccttcctctctctcttccttccttccttccttcgttcttcctttctgtctgtctgtctttctttttctttatttctcttttttccttccttccttccttccttccttccttctttctgtctttctgtctgtcttccttccttctttcttttctttctctctttctttctctctctctctctccctccctctctctctctctctctctctctctttctttctctttcttccttttctttttataaagagaatggagttgtcaggatatcaagacaggaggatctgggaggacttgggggaaggtaagcaatataatgcaaaatacaccgtagaaaaatttacactgtatgaaaagtttaaaagtaataaaatattaaaaggacataaatgaatatcaagagtaaagaatttgcaaaataccaagtcctaaccccacttggagttatgaaagcataagctaatgcctattgattaatttcctctctcttttctgtaaaactgatgactcctttgagatttccatcaatttgctcactccattttggcctcactgagtggccctgttacttgtttttaagtattcataactaaaattctccataactcactattctcaaattctcactattcataactaaaattctccataactcactattctcaaattctcactattcataactaaaattctccataaggatatttggtacatcaaggactctgtaaatctcatttacataaaagaaaatttcttcctcatcattaagtaggtttgttttcccctaccctctgtaaccttacttgtaatagacttaaaaatctctccgtaaaatcttccagtagataagaaagatttataagattacaatagtgctcaccatcccttctgtatcttgctattatttaccactggggaagaacatcaatgaataagtgcatgaagacccaatctggagtcggtcaagtttataacatggcagaatagacaccataccttttaaatgtctttttctatcatttgcattatatattaccaatatcattgtttaaatttggttttcctactagatcttatctcctctttttaaattagttagtaaattagtccagaacttgtaagttctatgctattattaggtgagagagtttagggctggggagcctatcttgtcatcacaacacagtggcccgagactcattcattggtttagaattgggatacaaacaagacaaactccctcaaacaaaaggcacgacatggaaaatacctacatcaacaattaagaagtctagccaacaccaggcattggtgaagtatgtttgatagccataggccacccatttgaggagcatctccaggatgaaaatgtaagtgaagactttgtcagcatactccagcatggttttgatcgtctttcgctgatcaatatatatatcctcaaaggcctagaaagaaaaggttacacattttagctttcaaacactactagaatcttacagctagctttttctgattatatatgcacatggtatttccttgggatggaagaacggggatacagtattgctattgctttgttactctctgagttttatccttataaaccagagagaaagatatactttagatagctactaaaaccagagaggggggaggtgtcttcatgacttcactcttcctgaagtgaaatggtaatttcctgagtcaattggctaagccaggatgtatttcttaatgtcacattccatgcagccatggcgtgtctctctctctctctctctctctctctctctctctctctctctctctctctctttgttattggatattttctttatttacatctcaaatgttatcccctttcccagttccccactcttggaaagcccctatcccatcccccatccccctgcatttgtaaggctttgacaggcctcataggagagagctatatcaggcttctttcagcaagcatttcttggcattcacaatagtgtctgggtttggtgactgtatatgggatgaattcccaggtaggacagactctggatggcctttccttcagtctctgctctatactttgtctccatatttgttcctatgagtattttgttcccctttctaagaaggaccaaagcacccacactttggtcttccttctttagtttcatgtggtctgtgaattgtatcttgggtatttggagcttttgggctaatatccacttctcagtgagtgcataccatgtgtgttcttttgtgattgggttaactcactcaggatgatattttctagtttcatccatttgcctaagaatttcataatttcattgtcttaatagctgactccattgtgtaaatgtaccacgttttctgtatccattccactttttgaccttagccattctgactggtatgaggtagaatctcagggctgttttgatttgcatttctcttatgattaaggatgttgaacacttttataggtgcttctcagccattctatattcctcagttgacaattctttctttagctctgtaccctgtttctttgtttctatgctgtgggtgtgactcagtggctagaacagttgtctacgtgagaccagtagcttgacttccagcaaaaaccaaatttctctcattattatgttttttttataggagagagattaaatcaataagtgatttatcaatatactgtccaattttattttactaagcagttaactgcttttttggggttttgttgataattctacttctttactttttctttcttttcttttgtttgtttgttttgtttgtttgtttgtttgttgtttgttttacaagacagggttactctgtataatagccctggctatcctcactttgtagagtaggctggggctctaactcacaaacatctgtctacctcttcctgatggaattaagggtgtgcaccaccacatctagctgataattttactttttggtacgtatagtatgacattacttaataggaatgtcatattacttttcaattagatccacctatgccttttcctaacataaacctcagctggtaatttacttctaatatatatttctttcaatgatgaaaagtcatttttgtctatgatatgcagatatgtagataatgatatgtagaagacagttattccatcaacaattttatagaaaaatatatacttgattttaaaacttgtaagtcattgtgttttaatcaggcaaacacttgtgcttatttatttatgtatatattctatcatttatctaaatctatatatcatctatctatctatctatctatctatctatctatctatctatctatctatctatagtttctctattatcaatctctccaaacattttattttatgacttcaatatatttttatatctaaaattctgtcaatatagttgtatatatgtaaacaattttcatctaaatttaaatagattctgatgaaattaacatgtttctataaacataatccagtctttaagtaatcacttaggtatggtgcccactacttagcattaccaatatcatttgtttcctgagtagcccaagaatagtgaacacacatgaaaagggacagagaagaggtccccaacgacctaccaagcttccacaaagagttcatcagaactcagaggatatataaccactataatagcactaacatgaactctgatgtgctcctcatagtcatgtttagttaagcaaagaggaatattcactttgtttataatgactaagcaaaagggacccgttttttttgatctgtttcatgataagcaaacatcgatgaatgattagaaatgtgtgtgcacacatagatgcaaacccagaaatgcagctagtcattaactatctggcaggaagataaaagggtgttgttattgaagactcattgataactaaggcaatgggaaacaaaggcttaaagagtgtgagattttcccagttgctactgaagcactttgggttaaggttcactcaccagggcaccactactcaggagaatcatgaacacaatgaaggtctcaaaccagttgtgttcaactattcggaagcacgtcctccgtaggttccaccactgtttccctcttccttcttccacgctgatttgacagcacttgaatctctggacacagcctgcaagcatacggttccaataggagtatgaaagatagctctaccacctccattatacattgcatcagcccagcttcatccctccaccaccagcgctattcctaatttgctttaacttttaaaaagtgtgtaatttataagcaatggcaaatcaatgaaaacatacagcatcttcatattttgccttttctctgacacaatgttgccttcaaagaaaactcattgtaaattacaaataacgacatgtagtttgccttttgtggttgttcttttctcatctctctctttttttttattttaattttaaaaatttctttaatccttttttatagtccagtatttatcccactcctggtctggccccttactgctcctcatcccatatttccctaccctagtatgtaagaggatgtgcccacccacaccccaccagacctccccactccctgggacctcaaatctctcaagggttaggtgcattttctctcactgaagctagaccaggaagtcctctgctgtatatgtgttgggggtctcatcagctggtgtatactgcctgttggtggctcagtgtctgaggcatcttgggagtccaggtcagttgagagtgctggtcttccatggggccaacctcctcctcagcttcttcctgcttttctctaattcaaccacgggagtccctggcttctgtgcactggttgggtgctagtatctgcatctgactttttatggtctgaaattaatgcatttggttggagctactctagaaaagggtttcaaaatgaaattaatacctggacagaaacctcctctcctaagtgtgtattcttgtggtgctcctgaaagggtgttcctggtttcctaagttgtctgagtttgctaacaggtgactttcctggacttgctttgatgtgtcttttacgtcctcacattgcttttatatactgaatctagcctgtgggcctcactctctacaaggtctattacatttaagccacccactttgggtgatcgacagttgaaaaggccgtactccgtatgaactgcaagcgatgtcacccgcatctttaccttcagtgaagcaagcttcgggctcaagggtttcttctggttcaatgacaggctgttcctctgcaggcgccccaatgtctactgtgcttccctctgaggagctactgctttcgttgagtttctgggcataaaatgatcataaaaagcaaattcttttaatttaattccccaatgaatgacataccaagaagggattatttttctcaaggtaaggtgctaatgtaaattgagagtaaaacgaagactcagaagaagagggaatgggaaaacctaactgttgattcctaccccaggaatttctgtgtgcagattgctgcgctgtgctgggatgtcacaaattgaccatcagcaacatgtagtgagggaactcctatcccatggattggggaaggagagagtgtcgtgacttgtaggaatggggagagagataagggaaatgaagctcggagaatctctacctgagaagaaaataaaaccattaagctagtctgtgtttaaacatttacatatgtttctctaatagtgtctcaattctgagaaattataacataatgctttaacttacacttcctgttagaacagaggatcagaattatttattataaatgtattcatatttttatatttcatatgccttttggagaaaaggtgttttacaataagttaaaaatacatcaataaacaaatagccttagactcttaattaaaggggttcattattggaaaatattttcgaacctaaagtgttgcagaaacagaccaataaatgcatggaaaagtcagtttccgctcaacaagtaacacactaatatcccacgtaaagctaattcaacagaaacagcgtttctcagactttggcagtagtcaccagacacatggtgctctttggatccttaggagtcaaagatggcaaaaacagcagaaaatatcaacttatcctgctgaccttcaaattgttgtaagagtaaatagtacacttggcaatttagtcaagttaagatacactgagcgccaacaatgtgctagaaacttggtgttcattggcaactataaaatccgtagccctattagatacttgaaataaaatacgatgtttttcaaacgatggatttatgtttaatctaaaagagatctcaccaactacccagtcaacacatatttttaaataataaactttaagcatcatgctaaaactactactactaattcgtatacatgaaacagttttctttgttccatcaaaggaagatggcttctacacctgggcctctatccagctgactgtctctcttccttttaaatttcttgttaaatagaaaattaaaggtcacaaggatctgcattgacatgaaagaccagtcatggttctgagtgtctgttttaaagattacctctgttattatacatagattcttcactggaagctagttttaagtttttaaataattatgactatagcacgtttacatattcatcatctggagaatttgctcctctgcacaggatacagcaacaggtagactttaaatctacactgcatttgctttgaatgattcaaccatttcttctgacttaaaaacatatccaaggataagtcatgcatttggccatataataagtgaagagactataataaatggctagtctgtgtgcttgagttacagtgcccattctgaggattcctgtgtctttcctcaacataactggaatctataattggctgtaatgtgctacaagaattatttcttatttcctaaaaaaaaccctgtgagtagaattttatcattatccagcattcttcttcttctcctcctcctcctcctcctcctcctcctcctccttcttcttcttcttcttcttcttcttctccttctcctcctcctcctcctcctcctccttctctctctctatatatatgtctgtctgtgtgtattctctttgtataataagtaaattgatttgagaagttaagagtccttaccaaaattcattaattactagaaatcccatcttcctccctctgaataaacttatgtgtgggcagggattcagataaactttattgtaaatagaaattttaacttgctgagcatgtaacagtgatctgttagatctctacagatattttgctctctgtcaagaatcacaatatcaggtaccattcagataaaacctaatcttcagtgatatcatttttcagtgtcaagtagaacaaaacgctctcaagcagcctttctacaacaatggcatttgctagtaagatactgcatatagctggttctacgtcttgccagccatatcatgtttttcacaatgaccactgttttcattgacgtgtgaagtactgacttcttattctacgtttaaaagattacttagttgatggaactaaatactatttttcttgttctaagaaaaaggagtctgaacaggtgagagggtgcgccacagaaccggatagcttctgggacaggcggaggcacagagccactgaggcagcatcctttgcgggcagcagacagccggccaccgtctggacaagaggacaggtgtccgcctggctcagaaggcagcctcagcctaaggagcagctgtcgccatcttggttccgggactccgcagaacctaggaaattagtctgaacaggtgagagggtgcgccacaaaaccggacagcttctgggacaggtggaggcacagagccactgaggcagcaccctttgcaggccgcagacagccggccaccgtccggaccagaggacaggtgtccgcctggctcggaaggcggcctcagcctcaggagcagtggtcgccatcttggttccaggactctgcagaacttaggaaattagtctgcacaggtgagagtctgcaccacagaagctgacagcttctgggacctgccaaagcaacacagcttctgagaaaggtcctgttttgggccttcttcttcggccaggaggaggtccaaacacaagatatctgcgcaccttccctgtaagagagcttgccagcagagagtgctctgagcactaaaactcagaggagagaatctgtctcccaggtctgctcatagacagtaacagaatcaccagaagaacaatctctaaacagagtcaactataactactaactccagagattaccagatggcgaaaggtaaacgtaggaatcttactaacaggacccaagaccactcaccatcatcagaacccagcactcccacttcgcccagtccagggcaccccaacacacccgaaaacctagacccagatttaaaagcatatctcatgatgatggtagaggacatcaagaaggactttaataactcacttaaagaaatacaggagaacactgctaaagagttacaagtccttaaagaaaaacaggaaaacacaatcaaacaggtagaagtctttacagaaaaagaggaaaaaacatacaaacaggtgatggaaatgaacaaaaccatactagacctaaaaagggaagtagacacaataaagaaactcaaagtgaggcaacactggagatagaaaccctaggaaagaaatctggaaccatagatttgagcatcagcaacagaatacaagagatggaagagagaatctcaggtgcagaagattccatagagaacatcggcacaacaatcaaagaaaatggtaaatgcaaaaagatcctaactcaaaatacccaggaaatccaggacacaatgagaagaccaaacctacggataataggagtggatgagaatgaagattttcaactcaaaggaccagcaaacatcttcaacaaaattattgaagaaaacttcccaaacctaaagaaagagatgcccatgaacatacaagaagcctacagaactccaaacagactggaccagagaagaaattcctcctgacacataataatcagaacatcaaattcactaaataaagatagaatactaaaagcagtaagggaaaaaagtcaagtaacatatataaaggcaagcctatcagaattacaccagatttttcaccagagactatgaaagccagaagagcctggacagatgttatacagacactaagaaaacacaaattccagcccaggctactatacccagccaaactctcaattaccatagatggagaaaccaaagtattccacgacaaaaccaaattcacacattatctctccacgaatccagcccttcaaaggataataacaggaaaaaaaaaaaaaaccaatacaagaacgggaacaatgccctagaaaaaacaagacgataatccctcaacaaacctaaaagaagacagccacaagaacagaatgccaactttaacaacaaaaataacaggaagcaacaattacttttccttaatatctcttaatatcaatggtctcaactctccaataaaaagacacagactaaaaaactggctacacaaacaagacccaacattttgctgcttacaggaaactcatctcagagaaaaagatagacactacctcagaatgaaaggctggaaaacaattttccaagcaaatggtatgaagaaacaagctggagtagccatcctaatatctgataagattgacttctaacccaaagtcaacaaaaaagacaaggaggggcacttcattctcatcaaaggtaaaatcctccaagaggaaatctcaattctgaatatctatgctccaaatacaagggcagccacattcattaaagaaactttagtaaagctcaaagcacacattgcacctcacacaataatagtgggagacttcaacacaccactttcaccaatggacagatcatggaaacagaaactaaacagggacacaagtgaaactaacagaagtgatgaaacaaatggatctgacagatatctacagaacattttatcctaaaacaaaaggatataccttcttctcagtacctcatggtaccttctccaaaattgaccacataataggtcacaaaacaggcctcaacagatgcaaacatattgaaattgtcccatgtatcctatcagatcaccatgcactaaggctgatcttcaataacaaaataaataatagaaagccaacattcacgtggaaactgaacaacacacttctcaatgataccttggtcaaggaaggaataaagaaagaaattagggacttcttagagttcaatgaaaatgaagccacttcatacccaaacttatgggacacaatgaaagcattcctaagaggaaaactcatagctctgagtgcctccaaaaagaaactagagagagcatacattagcagcttgacaacacacctaaaagctctagaacaaaaggaagcacattcacccaagaggagtagaaggcaggaaataatcaaactcaggggcgaaatcaaccaagtggaaacaagaagaactattcagagaatcaaccaatcgaggagctggttctttgagaaactcaacaagatagacaaacccttagccagactcactagagggtacagggaaagcattctaattaacaaaatcagaaatgaaaagggagacataacaacagatcctgaagaaatccaaaacaccatcagatccttctacaaaaggctatactcaacaaaactggagaacctggatgaaatggagaagtttctagacagataccaggtaccaaagttgaatcaagatcaggttaatgatctaaacagcccgatatcccccaaagaaatagaagcagtcattaatagtctcccaaccaaaaaaagcccaggaccagatgggtttagtgcagagttctatcagaccttcaaagaagatctaatcccagttcttcacaaactattccacaaaatagaaacagaaggtactctacccaactcattctatgaagccgcaattactctgatacctaaaccacaaaaagatcccacaaagatagagaacttcagaccaatatcccttatgaatattgatgcaaaaatcctcaataaagttcttgctaatcgaatccaagaacacatcaaaacaatcatccatcctgaccaagtaggtttcatcccagggatggagggatggttcaatatacagaaatccatcaacgtaatccagtatataaacaaactcaaagacaaaaaccacatgatcatctcgttagatgccgagaaagcatttgacaaaatccaacacccattcatgataaaagtcttggaaagatcaggaattcaaggcccatacctaaacatgataaaagcaatctacagcaatcccactaaaatcagggactagacaaggctgtctactctctccctacctattcaacattgtacttgaagtcctagccagagcaattagacaacaaaaggagatcaaggggatacaaattggaaaggaagaagtcaaaatatcactttttgcagatgatatgatagtatttataagtgaccctaaaaattccaccagagaactcctaagcctgataaacagcttcagtgaagtagctggatataaaattaactcaaacaagtcaatggcctttctctacacaaaggacaaactggctgagaaagaaattagggaaacaacacccttctcaatagccacaaataatataaaatacctaggcgtgactctaactaaggaagtgaaagatctctatgacaagaacttcaagtctctgaagaaagaaattaaagaagatctcagaagatggaaagatctcccatgctcatgcatcggcaggatcaatatagtaaaaatggctatcttgccaaaagcaatctacagattcaatgcaatccccatcaaaattccaactcaattcttcaacgaattaaaaagggcaatcggcagatccatctggaataacaaaaaacctaggatagcaaaaactcttctcaaggataaaagaacctctggtggaatcaccatgcctgacctaaagctttattacagcgcaattgtgatcaaaactgcatggtactggtatagagacagacaagtagaccaatggaacagaattgaagacccagagatgaacccacacacctatggtcacttgatctttgacaagggagctaaaaccatccagtggaaaaaagacagtattttcaacaaatggtgctggcacaactggctgttatcatgtagaagatttcgaattgatccagtactatctccttgtactaaggtcaaatctaagtggattaaggatctccacataaaaccagagacactgaaacttatagaggagaaagtagggaaaagcctcgaagatatgggtacaggggaaaaaatcctgaatagaacagcaatggcttgtgctgtaagatcgagaatcgataaatgggacctcataaaattgcaaagcttctgcaaggcaaaagacaccgtcaataagacaaaaagaccaccaacagattgggaaaggatctttacctatcccaaatcggacaggggttctaatatccaatatatataaagaactcaagaaggtagactccataaaatcaaataaccccattaaaaaatggggctcagaactgaacaaagatttctcacccgaggaataccgaatggcagagaagcacctgaaaaaatgttcaacatctttaatcatcagggaaatacaaatcaaaacaaccctgagattccacctcacaccagtcagaatggctaagatgaaaaattcaggtgacagcagatgctggcaaggatgtggagaaagaggaacactcctccattgttggtgggattgcaggcttgtacaaccactctggaaatcagtctggcggttcctcagaaaattggacatagtaataccggaagatccagcaatacctcttctgggcatatatccagaagatgccccaaccgataagaaggacacatgctccactatgttcatagcagccttatttataatagccagaagctggaaagaacccagatgcccctcaacagaggaatggatacaaaaaatgtggtacatttacacaatggagtactactcagctattaaaaagaatgaatttatgaaattcctagccaaatagatggacctggagggaatcatcttgagtgaggtaacccaatcacaaaggaactctcacaatatgtactcactgataagtggatattagcccagaaacttaggatacccaagatataagatataatttgctaaaaacattaaactcaagagaatgaagaccaaagtgtggacactttgccttcttagaataggaaacaaaacacccatggaaggagttacagagacaaagtttggaagtgtgatgaaaggatggaccatctagtgattgccatatccagagatccatcccatgatcagcttccaaatgctgacaccattgcatacactagcaagattttgctgaaaggacccagatatagctgtctcttgtgagactatgccatggcctagcaaacacagaagtggatgctcacagtcagctattgaatggaccacagggcccccaatggaggaactagagaaagcacccaaggaactaaagggaattgcaaccctataggtggaacaacaatatgaactaagcagtaccccggagctcttgtctctagctgcatatgtatcaaaagatggcctagtcggccatcactgcaaagagaggcccattggacttgcaaactttatatgccccagtacaggggaatgccagggccaaaaagggggagtgggtgggtaggggagtgggggggtatggggacttttggtatagcattggaaatgtaaatgagctaaatacctaataaaaaatggaaaaaaagaaaaaggcttatctgagaaatgcctggaatgaaaattgcaagaacccaaaaggcactatgttatcttttgacacattttcaaaatatcattttatgtagaaggcaaatagatatgcacttcaaaaaattcatttagactgtatttacattcatatttcacatgttgacttttttaggctacctacataaaattttcactcttccaaagtctttgtaaagaatatatgcagactgacagtttttccttgttatttttatattggcatcttaattcataaagatagtctgaggcttacattatttctattcaaactttattcttttgagttgtcgaaatatttctttctagtgaggatataatgggacagtaagacaaaaaaataaaaagacaacaaacactggtgtgtacaaactcaaccacctttactggaattttggttacataaaggcctaatctccttatttttaaatgcaattctgtcttctgacttatattttaccttcagtttaactgacctgaggtcagatagccatatacaatatctgctatcttgattttctaagctttactttgagttccgatatactgttcctttttgtaaacatctatggatacttgtggataatactaacattaaaaatactagtaatgggctacagatggttcagcggttaagagctctgacttctcttccagatgtcctgagttcaattccccgcatccacatggcagctctcaaccatctaaaactccagttccagaggttctgacgccctcatctgatcttgtgggaagaagatatgtaagtagtacacagatagacataaaagcaaatactcatgtgtgtgcatgtgtgtttgtgtgtgtttgcaagtcttattatatgaaataaaataaaggagtctcaatgtcgtcatttaatttgttacattttaatcatgagataaaacattgcttcagaactctaaaagcaaaggtatgcttattattatttatctcattgttaaaacaaaaagtaagtgcagttctttggttaagttatcactgctactcaaatagggaggaagctcaatagctctgagggaggggctcacctcaactttgcacacagacatgtttcatacaatattctaaagatcctaggtaacaatgcaacccagtgttgtcaaacaagtattttattattttaaaacttaatgaagtagactagttcctttttattcttaagttggtattaatttttgctttttaaagtatgtttcttagtgttttgaaattaataaaatatgttaaatccattttagcatttaatatgctattaatcaatcttcaatttattaattccctaatggactagttaattagaggctgggtatatttttccatataaaccgtctgatctgtgcaatccatatgtacttggcaggttatttatgaggtgagatgatcagttactaactgcgaccctgatggtaagagcattttcccttcaccgtggattcatgctcccttttttttccttttttttttttttttgcttttaaagatgttctctggtagagaaaatgaccttgaaaatgaaacaaaacaaaacagcaacagaacaagccacagcttggggtttctttggaaggaaccagtcaggtgtctctttcttctcagctttaactttaaacgtgagatgtctttattttgtgacctagtttattacagggatattattaatgtatattaatgaaagtttactttttatttttaagatttattattatatctaagtacactgtagctgtcttcagacacaccagaagagggcgtcagatctcattacggatggctgtgagccaccatgtggttgctggggtttgaactcaggacctttggaagagcagtcagtgctcttaccccctgagcccgaaagtttactttttaataagtgataaaaataattgggattttgtaactgatgggtcatatagtgcactgtcatatgtacagagagagagatgcaacaaagactagcacggaaggaacttatctataaatgaagcccatactcatctatgaacaaagcatgacgtgtttttaaccttagcctttcgctgacttgatacttttatacaaaaatatataaatgagattcctgatgctctgtttatcagttattattgtctcaaagggttaaaatacttggcaaagcagtttaaatggaagaacgttttcttttggctcatagtttctgagcaggcagtgcatgatggtggggagagagcatgttggtttagagcagtgcatgtcatggtgagcaagaaaaccaagaaagggaaagcagcctctgctggtagtcatcattgtcgtcatcttcgtcttcttcctcctcttcctcttctttctccccctcttcctcctccccctcctcctcttcctcctcttcctcctcttccttttcctcctcctcctccacctccttctcctcctcctactcctgctcctcctcctcctcttccttcttcttcttcttcttcttcttcttcttcttcttcttcttcttcttcttcttcttcttcttcttcttcttcttcttcttcttcttctccttcttcatttcttcttccccctctccttttattattcagtctgtgctcccagtccctgggtgggtgtcatttccatttaaacatagttttcttcttagttaaccctttatataaactccctaatagatgtactttggggtgcaccttacagttttctaggtggttctacatttagccaagtagacaatgcagattagccatcatactccatagcattaaatatatgaatgttaatatgttgttgtgtatattctgccttaggagatatttctaatgtatgcattaaaatcaaaatgatcactattaatgactctcaacaaagcaacactgtcatatcaaagaaaaagacactattgagacagtagttcttataaagcagcagggaagctcaaacaccagcccttagtgccccatatcatcagtttccctaatgtcggtctctactaccctaacttctcaatataaagacaggtggtattctccatacaccctgtttgggtactagcacaataggcaaattgcattgacacaatctattctaatatactaaaatttaaaaaaaatggggtaacatattggcttttaaactctaactgggcgatggcttgtaatttagaaacattacatctctaatgtttatactattgtaatatccatgatttttaaatcagcagatttctgagctacaagagcatgggaaaagaatggctatgggctctaggggttctgtggacaatcagtgatgaagatgtcagtgctctttctattcctgattaatgcaaacagaagctgtacaaatgcgaatcatgttaattttcagtggaaagataattttatggatactttttacaatacaattgcttatcagtaatattcagtacataataagtagctgctactattattcagccaatattaaatgtacgcctatagattcaaggacttaagatgaggagattcaaactagaacgaattttggaaatttatcttgtcagaaatttagaatgatgtgtttaaataagatgttttgttgatatttttacttttagatgtgatcttatatgtttcaggcttccctgaagctcactatctagctgagacgttgagttcctgatctttctgactttacctgcccaatgatgggcttttagtcattaggtaccatgctcaacaaacatttatttcacagttgacatctaccatttatttcctagaaaacaccaggtactaagtaaacattttaaataagacaatgttcacatagtagtccttaagacattcagtaagttaaaaaaaaaagtccatcttcctcccacactaaatccatctcattggagttagtagtttccccactgtctcacttctgtgttattttgctttctcttctttcacgagaagaccccaaaatatctcaatgcagccactgctagttttaatatcagttcctacttctaaaagtgggaattccaatatgacaccaaagtttttataaaagcttgaatcatcattaaatagacatattcaacaacctaatatcatgtcatgtgtctatgctttctgctctaggaactaccaaccaaaacacaccattgtttcccttgcttatggttgatataccagtcgatttttaataggaatagagtatctttgaatagagtgtctttaaagtatttagattactcaagctctaaatatgctttgttatctttgagacttccatgcaatagcattatatcacagaaatcccactgtaagatgaaaatgtagttagagaaaaaaaaaccattcaggacacacaaaccactgaacaccatagctagcaatatacacaggaatgtgttggttgttcagaaatagtaacggtaagttagcccaagttagagacagtcctaatatccacaaatgttttagctttaatattttcaagtaggacctcatggactgaattacattcccctacccattcttctatcctaaattcaattgctgaaactgagagtctctaaatatctgaaggtctggcttgataatgagctctacttatctaatgactccaagattctcatccaatagagtaattcccttacaagttgaggaagagacaagagatccatttctgttcagtgcacctatcagtcaggccttgtaaagacatagtgagaaggtggacatctacaaccttagcaaatagtcctccccagacactgaccctgcagtaccatggtcttgaaatgtctgctttccagattgtgaataaatttttttttttgtgtgtgtgtaagccatctatttcttagcaccatgctattttatgacattatgtaattttaatgtgacaattggtagggagcactttttttctgaagttcactcagttatttaaactgagatgacacacacaaaaatattaaaacttaaagacaaaggcttcaggttcaaagtggggttccacccctcacaggttacatgctcttagccagccaaagctggttgtttttttcttttgttttgttttgttttgttttttcacttgaaactttacagtaatatgttcctttctgttcattacaaggattaagtaactaatgatgctagtttttaattcattatttgtacccatttaacaaacagattttaagaatgagaaaactcatacaacagtatattacattttgctttggcattcatctccctgagaaaagatttttggaatctcaataaaataatatttgatattatatcaaaaaggttctatagaatcattaatacagaaagtataatccatacatatatttatacatatacatctccccaatttacagcatcttacctctttgctttcttctagatctgattcactgctaaagtcttctgtgtttaagttctcaaagtcagactctcccacagcaatgggcacagtcacagtgaggctggggttgtttatgaatgacatataatcactctcatcaatgatgtacttctccacactgctgcccgtccctatgccacttgtggttccattcacatctttcagacagtccagatctttcccaatttctgttgtgtggttagagatacaattgtcttttctgttgtttagatcatcaagtggcttaatttcatctagaatcttctgtttcttaacaaaggattgttgaatgaattcatatatttttctttttacataagctattcctttgtgcatcctgtccacagcaatctgcaggttgttcatctcattgtcatcatcagtggctgcaaggttgtctgcactaaatgagctcagaagcaaggccagaaagaggttcaagaccttgaaaacagacataagtatgtgttcaccacaacacagaggacataggatggcttattcctttagctatagaatgaataaccgaatgctatatgagcaagatacagcacaggcattgctagaagttaagtgggccaagaccagaaaacatgaggccctgggttcaacactccgccctagaaaagttttgagcactctgaatttgtgatattgctccatctctatgtacatgaggcattctttctactgctctcaagatctcccatacatgaaatgaagaacttgaatgaattagtttatcattatatttaatattatatgagtaaaagaagatatatttactgagatactttaacaattccaaatttaaaaatgattaatatttgcaattatttatttaaatgtattttgggttttctctcttcatgattttgtgttgttggatgataactgaaaaaaatcatagtcatgaccaaatttagaatgaaagtcttcaacatatgcatggaccattcttgttagcactattctatagcaaaaattgccccctttctccctcacatgcacacgcacacatagacatcacacacaaacacacgcacataacatatttgtgtaaatttttaacagtcctatgcaatttaataactaaatgcaatgaagtgactgaataaaatagagttgagaagccaggtggcacaatcactttaatccaagtacttgggatggagaggcaggtggatctctgagttcaagcccagctagatctacagagcaagttccaggacagccagggatacagaaagaaaccttgtcttaaaaaaatagagctgtaaaatatggatttgagagtaaaatatcataggtaatattaatgtgcatacatttgttttaagatgtatttctatattaccatagtagattgtgatactatactttgccatgttgcggtatatttttagaataagaagataaacatatcttaagatcagaggcatttaaaattatttatcatgaaagtcattttttaataaattgggcacaaatttgttatgttattgatgtatttctgaaatgcatatctaacttgggtacataccacaaggttcccaatcaccatgaccatcatgaagacagtaaggcacatagcttgtcctgccacctccatgcagtcccacatggtctctatccactccccacacagcacgcggaacacgatcaggaacgagtggaagaagtcgttcatgtgccaacgtgggagtttgcagtcagtggcaattttgcagacacaatctttgtaactttttccaaacagctgcatgccaaccacggcaaaaataaagacaatgatggccaacaccagagtcaggttgcccagtgctcccaccgagttaccaatgatcttaatgagcatattcagtgtgggccaagactttgccaacttgaacactcggagctagaaaatgagaacaaattaatatacattattatgatcttcacaagcattaattatcttgagacttactaaagaataaggggctgcagctcagagacagaacacctccttagtgggcatgcagccatgagatccgttgctagcactacacacccctaaaaaattctgcttacattatcttgctctaactttctcaggttcatagttaatatttagaccctcataggaagaatctagcttttccagattttaataatgtggctcatcttctctgaaagtgatttcctagttgcatattagaaactatattctttaatttgtttctctgagaccatcttccaagttttatagtgtcatattgatatctgaatgtgaataatttctgccaaaggattcatttgtcaaaaaggttctaagtaacattgcattgagagcattgatgaaaataaaatgaaaaatatttattatctattaatattataacagaggaaaaatataaataaatgcaatgtattgttaaacctggattatttgctatgactcttcctcaatcttcagggaatttgtatgaatctatctatctatctatctatctatctatctatctatctatctatccttaatagacctgcaaacttttgtttttatggaacatattttttagaagtagaattacatgcatacattttatgtgaatatcgaagagttatttacattttcaacatttattaagttattaaccatttctattaaacacacttcttcaggttgaaagtattaattgtccaagtcattagaaagaacacattatcaacacagcaatagaaaaagatatcagtgttcacgtgacggggctagtgacagctcaaggctctgggttatgtaacccagcactgcaaacttataaatgataatattagaaagtttacataaataggcttttcagaagaaagttgcctttgtaaaaaaatatacaaatattacctgagagatattattccccatttagaggtatcagcctacacaaaaacttaaaatgataatagttttgtggaaaagtatagggaagcactatgagagaacaccactggggaaaacagttattattgcagttgtcttgtttaccagtcgaaatgaacggagaactgacaatccttccacattggcaaggccaagttctaccaggctgagtgtcacaatgaaaccatcaaagatattccagccttcttggaagtaatagtaaggatccattgcgatgattttcaggaacatttctgctgtgaaaatcccagtgaagacctaaaagcaaaaccatattatttaaattatcttagatagtgataacatcaaagataatattatatatatatatgtatatacatatatatatatatatatatatatatatatatatatatatatatatatatataaaagactaatgctacttctacttttccattattgatcctaagattatcctacaagtttatttgacaatgctggtttatattagtttactgttttatgctcatagaagctccaataaccagatagtgtaaatgctgtaactattttattacagatgaagagaacaatatttcaaggtatataaaatgcccatctattattaaccaacttccagacctcatgtcacctagacaagattttgccccaaaacattttatttgtaagtttatctttattcccttcaaatcatgtgtatcttatattattctcatcactatcattaatattagtcacatgcactaaaagtgcgtttccagaatctaaatagtagagatttaaaaatataaatccactatagcatatgcatatttacattgtctttatcagcaagatactaaacattctcctagatattatatagaatgcatgttatactttagatagttctttcttcaaataaaaacctgagacttttaagttgagtctgctggaaaatattttaacaatttatgcttcaaagtaaaaaatggagaatattgtcgaaactttcactaaaaatgggcttactaatcatatgatgtacaaaatgcactaggtactgtcaatatttcatgatatgaatctagaacagaacttagactcccttgaccctggaaggaaaaaagatggagacacttttgtgttatcattctttgaaagagcatataaggaagagaactcatgaccttatttgaaccatctggagctaggacagagtgatcttatcatttaaagaagaacatggccttagattctgaaagaacaccattactgactttttaaattattattacaggtctatgttctatttctcagtttttgcacagacattaaaggccattatttggcaaaaggtagtgtgtacccgtctggatattattgccttagggatgcaggaattgtggttgaaagaggtctaataaactattgaagataataaacagtttcttaagcagaaaatttgaagaccaagctcatttatttaccttcttgcacacttaccaagtttcccactgtaagaacatggttgaaatgttcagtcatggggtagtgctccatagccatgaagagcgtatttaacacaatgcagatggtaatggccagatcaacaaatgggtccatcaccaccaggttgacaatatgtttaactttcagccaatatggagaacagtcccaaattaagaatatgttggaaaatttataccaacagggtggacatttctgcctggattcttctagttctagatttaaaaaaaaaatagaagaaacaataaccaattatttgaaccatctagagctaggacacagtgattctatcatttaaagaagatcatggccttagattctgaaagaacaccattactgacttacaaatttacaaatttattttagatccactaaacatgctctcagtagcaaacatatttctctttgctgcaaagataattacttgataaaatggtacagtatcattagtcatgtacatagagataggaaagaaaactttttgttttgtttttgcatagacagtgttgcttaacacttggcctctattacagtggttgggcatatagacaaaggttccatggaaacatagcctggaactattcactctgtgtaaaatttcttgttactgataggctacacaattttaagatttaggacaaggattaatgtaatatataaagaaatcattctttatgctttgattttgtgaaagtgacttattcttttctccagtcttaaaattatttcagatcataatgtaaggggccatgctgctgaagtttgaagcacattacaacaaaggatttgtgactaatggattagaaacctctagctgttcccacatacttattaagacattaaaagttcagaagtttagaacattgaatttagtatgtaatactttcagaatacatcaccagccatttgctagtaggactgttccttttacttttgttcatagagtgtacttgccaacacataagtagagagagttgactccaacaagatattgcaagatggctgaactgagggaggtagggtttgttaccaaccttctactgtatttgttaagatgctggctatgctcattgccctttgcctctgggaaggatcttctagaaagtccatggaaacatggaaagagctcgacctcctctttctcatctcagtttcagtggttgttccctgcaaagcaaatgctaaggcattacatgactagcttgagcaatacagcacagaaataaatggagacagtgattttcatgaaagacatgcgtcatgcgtcttcatctttgatggccaatggcagatactggtgacttattggatcattaacctggaatattcaaacagttaaccatgtagtcataaaggaaaatataaaattttgacccctccttgattttatactcttatgaaataggatgcgatcaaaatatagttagtaaagctttgcataggcatttatagcttgttttcaattaatgaacatactgtcaaatcttaatgccttaaaatcttatatatggtcaggccatttttcactttcgagaaagtagctgtttaattttaagaaaataccgaagaccataacacacttagctgtcatctcaatttctaagcataagacatatactcatttattataaagtatatgctgatccatgcatgtgatgcaggggcaacagtttcatccaggataccaaagcaataagtcatctgatttacaccgagtcatgcctcgtcatgctgatatatttccaattattttatctggattaataatttattggtgtctctgtgtagattgttttgtgaatacctatatcagcatttctttcttagtgagataaatatgatccttagaaaatgtaggtaatgatgaagctatctaagcacagtgtttttgaaaatctgaactaaagcccagataaactgtaagagtttagtgggaagatttactatacaccctttacactaaaaagtcattcatttaatcttacaataatagggcactaggggtgatgtcttcatatgtaaattcggtatgggtacatagcaaatcatccaaggaagtaattattgttcaattaatccttagcatatacagtaggtaatgcattcaggtttgtgcaaggagtgccgaggcgctaacatttagctggttagtctattaaaggtgctacaagatgcaggtgcattctcagctcgaccaaccaggaatcattctcaagagttccattctgtagaaacactggctggtgcagcaatcataggccagccatgcctgaactatgtaaaactttcttacattgtcatcagtagctggcttatctattatcacctctggcagaagctgtccaactggcgatgtgggaactgagggtccaccaaccaaggaaaccacaccattgcaatccaccgtgctgtgcatcttcccattggctggaaacaccgccagcattcgggaggacctgctggtctggctcaggttactgttgcgtcgctctccgtgtcttcggggaacgaacagtgagtctctacggctctcattatcctcaaaggtgctgtgttcatcatcagcaaagtcattctcagaccccacatccttggctcgccctctaaagctgaaaagacttgttctgctattgcgtcttggggagaacagggaaccacgaatgcttaacagagactgaaagtttgaaacacatgacaaaaagtaaaattacattagaactgcctgttgaaatagttttgcaagtttaagttgaagaatattgcattgttattttagagagggtagcacattccttctgattaatataatttattggcattcagatgagattaaattagttctatacagtatggcttccagccattgatattaaataacagatagctggagtgcagcctaaaagtaatgggagaaaaaaaaatacccagccaccacgtctcaaatttaaacagagacatccttaaaaatctctctatgtatgtatccacctacaatgaacatgggcagcaagacagcaacggtttttaatttctctctccttttggataattccaacaatagttttcacagactattttagttcagtttcctaaaaccatgttatttatttttttgacacagctgtaaaacagattacttgtagaaccagaaagtaaaaatttcgaaattctgaatgatgcacttttctataaagtttatcatggctaatatttttaaagttcatgggataattgataaagaagttatgggatgacaaccaacatggtgccttaaattaaccaaaggtacatttctgagtagctaacccctagtctacattttgttgatgtggttagaatagctgcaagattaaatgtcattacaattaccagaaggcacatttaacatgaaaagccagttctcctgtcttccaatcctgtgttatttcaaaagcacctaagagtggatttgcatatatgtggatgggaagtaaaactttcacataactacatagaggggaaaaaacagttttaagtgtaatgcaacagtagtcaattcggttgatgaaaacccatccatctatttaaattctctctcagatggctcactctcatcggtgtatccaagaactctgcagtgcgtacctgatgcggggaagagtacctcttttcatatgtcagtctattcccttctatggagaagcgaaaccccttcctcctgatgctgtcttcagactcagacttgtggaattcatcatcatctttctcttctcctccagactgctctttctgtttcctttttttcctccgatttcgtctttctttagcactcttcgaactcaacttagaggcttctgaagagctatctgagagcctgcctgctgcactgggctccctggaatgttctgaggctgttgtagccgctgcctgctatatagaggagaaaccaattcagtgtgttgcaagaaacgactgcattaaatctttaagatgctcaagtttggtgtgtcatgtccaaaatgcaagctaactgaaaccaacatctagatgatgttttccaggtatgaagggaagtttttttttctttttaactaataatgaattttaaaaataatctacttttctccatggtaacatttattaactttgtctgatgccgcagagattcgtaagattcattggcagtcaagaataactcaagattctattcaaagctggtaatgaggtagtgagcaggggtcctctcaggtttccatgcttatcaaagtgttcaatatcttccacatagtatcaacatatgtggagatgttccacataatcagcgttatgaaacatatcacagtttcttcctcactctcccctgatacagttatctatagaaaggagagagttgagagctttctgctaagcaagttaaaagatgttcagttctctaaaagccatcccaactatcttcatatcaatgttggctcttactagttatggggtaagatgctgtgtggtcacagcttgttctgttatgaagaagttagaacttcttagtcaacattcttcccacaattcccttaatctagaactgtagcagataaattagcatgcttgaagtaactcttttttttttttatggtcaagatggttacaaataaatttgatttaaatagtttaattagtctttttgaaaatacacataatgaattcgtatgtcccatttagaaaccacaaggaaacgtgggcaattggattcatttttttttttttcattcagtgagtcaggtacactgacaagccatggaaaggtcaagtaaacctcttgtagtactccatattgctaatgatgcttctttgcctagtggatggttttgaccaagagaacattttattaaaaggaaattgaacaaccccacctaaagacattgtatttctgaataaagaaaataataaattactttaatgaaatggccaaatgggttttatatgtcaactaatgaatttgcttgtcagaaaagattgttgtcttatgatactttttctaatgctagtatatttgagtaaaagattttaaacttgggggggggcaaaaaagcccaaagttactatttctcttttcttcttgattctatttaaagtgataaaaataacataagaagcatcttctgtagctagtgtaaaacagctctgtacaacttagtgatgtgactaggccaattcaaactaaaaagatgacccatacatagaagtccttggagtttgatgtgctcagctttctcacatcctgtcagatgactctgccttttgtttcattacagctctttgtaacatggcagtgaaagaggtgacaccagaagactagagaaatgaaggtcggagataagacctacttgaactgctgagtacctgtgcagcctcttgctgcttcttaagttgctccaacatctgctgaaattctgcctctttctgttcagcctcctccagtgtggcctgattctgctcctcataggccatggccaccacagccaggatcaagtttatcaggtagaatgagcccaagaaaatgaccagcacaaaaaatatcatgtaggttttgccagcagcacgcaatgtctagaaacaagaatatgagaattatttttacaattatgtcggtattgggtgacttcacattttaacttacttgtgtatgtggcagaactctgacaaaattaacattgtgtcccatcagtatttctttaacctctatctcttctttcttctttaagataagcattcatagtcataataagggattcttggattcaccaggaataacagttgatagaaagcaatggggaccaccatgaaaaagctgagcctttcatggaaattaaagagaccaatggaaaaggtaatacttgagcagaggacagggcagagggaagacttggcttttgcttaggagaaattgtatctaagaggaatgagaaatagaattcaaggcatggagaaacagaacagaattactctccttggcgttactccatttaatgcgtattgtaatcaatgggttagaggagtccgagtcattctttctctactgtatcatgctgcgggttgtgtttcatgactcagtttgtgttcttacacgcttttacttaaattttcagattctcaccagttggtatagattttcccagaagtcctgagtcatcagtcgaaacagggacaaaaatgcccaactgaaggtatcaaagcttgtgtaaccataattagggtttctaccagcttttacacacatatatccttctggacattggctgcaaatggggaaaaagaaagtatgacaagacattctgctgtcttcttactctggtagaagcctacacttacaaaataatctagtcactacttaaaggacacaggcgtgtggaatccgaattgctgatacatttcccacctttgactccatagtatctatcttattagctgcaaggtattgatattgcttagtaaccttttcccctcactgtgaagtctccaaaggtgattcatagctttatacgtacaccaagaaaatagcattacagatcaaagtgttgcttcttgctttacagatgaaactttaatatttagataatttcttgttttatttatatcatagttactgacaattagtatgcataaagttagttgctgttatcagtcaatttctagagccaaagatacacacagacacatccatatacaaacatatgtatggggacatactacacatacatctcacacgcgtgatcagcttaccctgcatcagagctatttccacacagcagtgcatctaaaacaccctccaggaaataatgatatcctgtttgaaaaaaagagaaagccacatgatacacacttgcattgtgaaacacattaaaagaagagtaggaaagtcaggtcttactttttggttcactaagtgagtttacaagtatcttatcatccacttaaacacatgagttttttccttttcttccttcaaattctgttattaaattaaaggtatcgataatcaactgtacgaggtttttttcttttcattattagtggaatgttagtgacaaccatgggtacttagggaacatttatgaaaaggtatcagtattttctactacttttgtaaaataaagaaaaagttcatcatccaaagaagatgacaatgatgggtatctcaaaaataactacatatttcaaaagaaaaaaatgatatattttcttgttctattttcatattttcaatccctgttaaaactttcaaattaattataacttacatttttcagttcgtagtatatatgtcaattgacacaaattgtatcaactatctgaatattttaatgaaatgaaatattttagaattgaatataaaacaaataatatttcttacaaattaatgaaaaatgtagaacatcttaaatattaaagttaaaacaattagagtaggcgaacatcaaatcttatcagttctccctagttctcaagagttcacatctttcattactagaggagccatgtctgcaagactttccttggccatccatttcctttccatcaaagattgacaaggaagaaacaacctcaggttgtgtccagtaggttgtatgctcacacagtatcctcagaaaaaccattatcccattgcaactactcattcaaaaagtattagcgccgggcgtggtggcgcacacctttaatcccagcactcgggaggcagaggcaggcggatttctgagttcgaggccagcctggtctacaaagtgagttccaggacagccagggctatacagagaaaccctgtctcgaaaaaccaaaaaaaaaaaaaaaaaaaaaaaaaaaaaaaaaaagaaaaaaaagtattagcagtattagaaataaagcgacgttcattatccccctataacttagttgggattttgtatcctttcaagaagtgaaatgagtagataggaacaacagaaaaaagagaatggaaacaggccacctcaggaggtaggaggtggggtgaccctctagaatgtaccagagaccaggaaggtgagagacgctcagggggagggaccttaggtgaaatgcccaaccgtgggtagaaggaacttgtagagcccacctccagtagaaagacaggacatcaagtggagggatggggttgccatcccaaagtcaaaaactctgacccagaattgttcctgtctaaaagaactgcaggaactaaaatggagaagagactgagggaaaggacgtccagtgccagcctaattagggatccagcccaaggggagactccaaggcctgatactattactgatgatatggtgtgcttatggacaggagcctagcatggctgcaatctgagagccccaacaagcagctgaaagagtcagatgcagatacacccaaccaatggacagaagccaggaactcctgcagttgaattagggaaaggctggaagaagctgaggaggatgaccaccccataggaagaccagcagtctcaactaacctggatccccgagacctctcagacactgagccaccaaccaggcagcatgtaccagctgatatgaggcccctgacacatatacagcagaagactgccaggtctgggttcagtcagagaagataaacttaacccttgagagacttgagatcccagggagtggggaggtttggtggggtggggtgtgggcggggtgtagggacatcctcttggaaatggggtaggagggaggaggtatgggatgaggactagtcagagggcagactggaagtgggataatgactgaaagattaaagtaaagaaagattaaagaataataaaagaaataaggtgtgtaaatattttcaaaatttacatcagataattttctaagtgactacaacatccttgtgatcatgtttagtctgtgactagacaggaagcaggcagactatgaaaggataagtacacatattgatggttcttacttgagtcttgaatgtatgatttccagtcaaactcgaacacggtttcatttacaagtgtgccattgtaatccatagttatattcttctctatgctatgttcctcaagggaagcgttggtgggaggccactgtacacatttattcctcaggttgcccatgaagagctgcaacccgatgagtgcgaacacactgagacagaacacagtgagtatcatgacgtcagacagcttcttcaccgactggatcagggcccccacgatggtcttcaggcctgagagaaagaagtgtatcaagcatctgaaatattaaataagtccttcacacaagtctctcggagacactaaataaacgtgtaagtcccaaaatgtggcccatggcagggacattgtcctataaaaagttcgagagtgtagcttcatttaagaacatagcattcatgctgttgtaggttattctttaagtcttataattggtcttttgttagcaaagaatgggattgtttttgcataggcatcaatgggtataatgaataaaaatgaaaaatttatacatataatagggaacaaattctttataacattgacattacaaaaatactttttttttctcgagacagggtttctctgtgtagccctggctgtcttgaaactcactctgtagaccaggctggcctcgaactcagaaatccgcctgcctctgcctcccaagtgctggaattaaaggtgtataccaccactgtccggcacaaaaatacattatatagtaaaagttggttgggttgaatatcagagtgtccacaaattaaacacaaaggttgataaaacctccagagagagtaatcttataggaagtactcagtcttatgattctcagctttctgtaatgatgaatggcaagcaaggaggctcagttgaaaaagtctcagagttaactcactgattaacctacatgctttcatatagctctcacctggaatgactgaaatagttttcaatgctcgaagaactctgaatgttctcaatgctgagacattgcccaggtccacaaactccgtcacatatctgtaatgaggagttcacacacagacacaataacaggaagcaaagaaagttttgtaggtacaattaccttatgctttatagtaattgcttctaattagaaatgtgggaatggtctttagactcaatcctctaaatgtgtgaatagctaaaaattacctaggtatacaaactttgttacttacctgtaaatgatttaagattgaaaagacactagcatttatctgatattttatgaagatctttgctgcttttaaatagtgtaagttgcaaattaaaatttagacttcatcaatgtagtcttatttttcatgataaataccacaactaaatgtaaatttcataaaatatacaatcttgatgccatttggtaggcaaggtagaaacactatatgtgaattgggaaaattaactaaattaattagttaactggaaccaaatccacaggctagggtttcagctagaaaagaaatgatataggaaatcatccaacagaactatcgattataaaagattgcctcttgccccactattcaagactcgcatttcctaaaataacgtttgaatagaagttgaacaaataaattaacaatagcatcttacatggcccaaggccactctgtcatcacttctattttagtctcaagagtgagaagtctcaaatactgtcctgaaagttgtggctgaaacgcatgggaacctttcatattccaatcagacataaagttatacagttaaggtcagacatccaggatttgcactttggagccgatcagtaccatctcctgtcctgtgtatcccttcactcctgctgatgcccagaaagtcagctacccagatgggataagtggtattaatccactgtcctccatacctacttttgactattcttgaatagctacctattattctcatctcttcctggtgtggaggggcgtgatttatcactagcaaaagggagaagacaggaaagtagggactgaatatacaactcagtgtatattgaaaagctttgtgttgagtaaaataaagaagagcctaaaaacaagagagggagggagggagggagggagagggagggagggagggagggagggagggagggagggagggagagagagagagagagagagcgagagagagagagagagagagagagagagagagagagagagagagagagagagagagagagaggaatacaaattgaatcagaagggaaatagaggcaaggtatgtctgctcaagaaataaccatttatttgatttatgatgtatcaaatgtctttttcaccttaggatcttatttccagcatggctacaatctttctactattctataaaggtaacaaaagaagccacggggtgaggcacaacaggactatcagtgaaaagttcagtgcaagtttgtgggaccagtgcaaattttgctgtgtgaactttcaaaaccatcctccagctcaggagataaataagttatgcttcagtattacaagtatttgtgtgaggagaccagaatatacaatattttctttctttttggggggtagggggtgagacaggatttctctctatagccctggctgtcctggaactcactctgtaaagcaggctgaccttgaacttagaaattcacctgcctctgtctcctgagtgctgggattaaaggtgttcgccacacctgcctggctacaaaattttctgatgttttaagtgttattaaaattgctattactattctcatggagcagtggaatgggtttacccttttgaggtaaatgttaagacacggagttcaggtgcccaaatcatgccaggatgttttaccactcgagcatgttgtttaaaaacctgagcatagacagcaaaccaaactgtattctctcaggtttccaaaagagaaggcacttacgcgaatgtaatgacagtgaagtccagccagttccatgggtcgcgaaggaaagtaaaatcttctaaacagaagccccttgcaataatttttattagtgattcaaaagtatatattcctgtgaaggtgtacctagaaacaagtagccaaatcaattaaggactttgtaatttcattcagagtacatcagcttcttagcatgttgtcctcggaaaacatggataccaacaaaggaaacatgtgagtttgaatagtttcagaatccatcacatacatagtttcttatggttttttttttgtttgtttgttttgttttgtttttttcccagaatctgaccttccatttagaagcactagaagaagaggctttgggaaacactgtggggggtgaaaggtcagaaaccagagagttctaggtgtcagaacatgggcaggcacgaaagctgcgattgaaacatccagagctccagttacataactgcctctccttctactggggcatcaagagctggccagtgtcattagtaatgcttccagcccttgagaatgcttcctgaatttccactgtagacattttagccttccataaactgaatttccaagttttataatcctgaaactttagttaagttcttgatgatcatacttaaaatagatataaacctggataaatcccagtgatcaagagactcaatatggttctttattattattagatatttactttatttacatttcaaatgttgtccactttcctgctttcccctctgaaaatcccctatcccctcccctctccccctgctcaccaacccagccacaccctctttcttgccctggcattcccctacactgtggttcttaatgtagcatttacagcttaatcattttgattcttaattagcccaattaatgtggaggttatctggaataaaaagtccagcatatattgtctatatttctgtagttacttccatcaattttcttttcaaatactggatcctgaaagaaaacccttgagttttctagtagactttgtatcaattatatgagtaaagagaaatcctagatctgacaccagcaagcctgggacccaatgactgctgtcttattttaaagctgcatctataaatggctttatcacacatgttctccagtttaatttaaaggctacattgagaaatagtttcaaaaatctcaaatatatgtacaggaacaaacatttaaaataaacttactccacattctttgtccagtcgggagggttactcattgtcataaatacacagtttgtcaaaatagtgcacatgattaacatgctgaataatgtaggttagtgttaaggaacatacaaaagaaagttcatgcattgtattaaaaaaaaccaaagtaacactgaaaaacccagacctcagttcaacaggactcatgggtaaacatgtgcacaaatactacctaatctccttacatttcactcaaatttcatatgatgctaaatatgcatcatagtgtgacctccacaatttcagagtaaatgagagtatggaaggacataagaatacaagttgctattgcggttgtttttataccagcatgattaccttccaaggtgctttttctaagcgggaagtggaggtggttgggggggtggtggatgcatttctctcttttaaaatgtatttaaattttatttgcaacattgttgagcagaaagcatggatgtgaattaattgcacaattagaatagtaaattttcgaggaaggtgcatttctgcaataccgagatctcgtcgttaatggatagaattttgacgtcacggtcaaagcagagcgtggtgcagagtgctaagtagccgtgttttgagtgagtttatgtaagcacaacagcatgagaagatggaaggggagatgtgtgaaggtcagggctcatcgccactgggatgtaattgaaattccacagtgacacctgttcttgggccaatcggtcacttatcctttctgtgccttcaaccaccctctggctccacctacattcaacacccggatgttaagctggacagactttgttattggtcgcgtagattaaagtaatcagtgagtatgaaatgctcggaagcaatgccgctggagaaatgtgtacgcactgagtggtaggtcagagaagaacaggtaatagggccattgaaagtggctgtaaaaagtgttttagaaatgccagaaataaccgctacgtcctggagaaaacagatgatccgcaggatcttaaaatatgtgttttctgtcttagtagcaggtattctttctactacactcgactaaccacacaaaacatttccattaggtgtagggaaagatttcatcaaatgaccacatgatggcactagaaatgcaaactaagatggaaaagcttttgagtgagcataggcactttttataaggtacatctttagtgttcgatgatagactattaataggactaacgatttacttgtgatcaactggactcaaaaagaagggcctttattttttgttgttgcttttattgtttttgttagttattattttactttcttgttttgttttgtatctccttttgttggtgtagtgctgtttttttgtttgtttgttttattttttttaaatgaacgtttcttctttagtcattgttttttgtagtgccagggaacaaatcaaacccagagccttgtgtttggacaactctttagattttagaatttgtgattttaaaaaaaatcttgctagtatgaccttatgatacttacaatagtatttttatactaattgtgaccaaggccaccaaaagagactcagtcataaatgaaggtttttcactgatcaatatccacgccggaactgagttgcagaaacctttaaacccaaaggcgaccacagaggcaaactcccttcaaccttttagaacagttttagcttctttcctgaatctgcactaaagagacaatgctatacaacagacccatatattctgtggcttaaatctgatattcagccaacttcataaaactgatcagaaaagttgactaactagctaagcctgaagtgtcttgagattcttataagcttacatgatccccccaaaggtctttaaaatggcatacatcatatctgtgtctaatctgtattttactttgaaaatagtttttttgtgtgtgattaattttactgaaaattttatgcaactctgtacaaagatgttgacaagaaacatggcgatcttgcacaaaacttaggggattcaatacatatatgaaagctagtgttagttgtcaatctgacagaatctagaatactctaacagacgggcctcattgcatgtctctggggaattattgtgactgctttgttaattcagacggaaagacccatctactgtggctggcaccgttccctggctgggatcctggaatgtagactagggttcagggctgaaggggtgccttaatggtagggtgtttccctgacatttctgaggccccgggttcaattctcagcactacaaaaacaaaaagagatttccttgaccaacaaaagatattagatgaaagctatagagtatatgcacatttttttaacttaataatacatagaagacacaatgaatacaaacagttaacaccaaccacttgcaaaaggatatgagtgtaccaaaatcttaatagctattttcctaagaggattgaagggtgttaaaatgtacagggcggaggtggcactgaaccggaagatggccttccctttattcaatactataaaagtctgtaaaataggaataaacacataagtataaaacagacttcctattttccaatagggttgcagtgaataattccaattcagatgcccaggacaatcacttttgatatgtaccatgagtacagctctctctggtcacttatgtcccagagatgaacttacagtggctcttaccttccaccaaccacttacctgagtttgtgcatcagccacgagaatgtcctcatttccttaatattttaagtgtcttacttaagccaaagtttgaaatggggacacatttcattttcatcctaacattcacaagaattccttctcataatgatttgtttgcctagatgaagtatcaggaaaatgaatcctgcaggatgcaaaatcattcaacagaaccgaatgttttaaaaataaatattccttcactacccgtgcttataaaataaacatcatcgctccgctggtaatagagaacaaaagcagcttccatctagcccgcacctattggatggatactatccagtcattgatttctgcaggacaggctccctggagagtatcttgttgaccaggagtgctaaattctgtattgggattcctgaggtagctgacacttggtttctaatcccaattgactctcccctgtgtggaggaaaagctcaaggtccctggagaactcaggacccataaatatgaagagcatctacgacaagagtcagacttactacacagcaaagatcagtgtgcagagggaaaagactcaccatgcaatggagcaacacggcttagtctgacacagtcttctaagtcatttactgatactcagcctaggccgagatggatgaagctgacatctctgtgaataacacactaaatagagagaatgctaaggtttgagtttattttttttttagtgactctattctaattcctaagtatggggaatgcaattaaggcctcctgcatgctaagcaagtgttttaccatagggtcatgttcccagctcagggtgtgtgtgcacatgcgtgtataatctataaccaacccagagtgttatacaagggatccaccaccgaatgctgtccccagcacagcttttaatatgtttatgcatctattccttaaaactcccatgttttagccttttgatgcatagctctatggaccctgctatgattagcacactctataacgtgccgtttgttttctcctgagcattttttgatagcatttcttcttcacatttaaactttaggtcactaacatgttttcattttatttttcactttgaccttgagattttcaaatggagcaatccttgaacacagagtttctgtttgaaaatagccctttctctctgggattcaaacagaaaagctctaaatgtactatgaaaatatcccctaagtagtggggatctgttagttttctcagctgtgacacacacacacacacacacacacacacagacaaaatccaactactgagagtaaaacctgtgtttagaaagttgtaatgcaattttgagtctgttgaaaatgatgataaaataaaacaagagactgtaggctgggctatcccatttcatttcagttacttagcaattaatgtcactgtgtcatagataaacagagaccacatcacctgggtgggaaaagtgctgcttctctaagcctgacctttgaccacatgtcatctaatcatcactgaatgggtgcatccagcacaagggagacgaccttaagatgtctgtgagggaggaacgcactccagtggcaatcgcttgtggttggtacatagttcccgttattctctctgattcattcaatatttttgtccctaaacgaccttgtgaaagcatcataaaacatgaatggacttgggtaagggaaatatccttgccttaaggaatgtgagcatccaaggacacagaacgagcaaagcttaggaccaatgatttttttcaaagttcttgcctgtacctccttatccagaaacacagccagtcaaatgtgatagaaatattgggggctagagtaggaactgtagttaaaaaaattgtaactagaaagaatatatactcttcacctaagaatctaatttcatatattactatagaccgattttgaaatgactatggtgatagagatgacaaacgagtttcagggttactgtagcatcttttacaggctggaggatgagtcttgggagggtcagtagtagttcagtgggcagggaaattcccaggctcatcccattgaaactggctatactcagaatcgcaatgacacaggttccttggcaaccttctgtttacatgatgagtaaaggaagctgtagtggtttgaatgagaatagccccagtaggcatgtgtatttcaatatgtgggcctcggatgtcaaaactgtttgggaaggactttgttggaggtcatgtgttaacagatgtaggttttgaggttccaaaagtccaaaccaacctcagtttgtgttctctctgtctgtctctgtctctgtctgactctgtctctgtctctgtctctgtctctgtctctctctctctctgtctctctctgtctctctctctctctctctgtgtgtgtgtgtgtgtgtgtgtgtgtgtgtgtgtgtgtgtgtgtcttattcatggatacagtacaagctctcagccactgttccagcaccatgctggcctgcctgcctgactgctgtcatactttcccccatgatggtcatggactcatgcgaacccctacaataaatgctttccttttcaggtttccttagtcatggagttttgttatggcagtagcaaagtcaccactacaggaacacttgacagaaaatagaaaagagaaaagaggaagcagggacaaaacaggaattattagtgaggccaaagctgagactctgaaacttagcaagagagaaccaggagggaactttaggcactggaactcagcaaagcagtgttggtaatagctcggcaaccccagtcctgattaataattgaaaatttggacgaccagtggttgaacaccttgacataattcttaaattttcaaaggtttctgtcctttatgatatatttgatacatctatttattaaatgcaaataatttgtaaaaacatgttgcataaagaacttcatgtgcaatgtaggtgggttgaaacaggagactgatgagctttgactgcacagcatgctttctgtactttaatttttcataagatttcttcccacccctgccaaggactgtaacaatagtgccagccttgcagaaccactttcattgtttcttacccaatgatagatatattccttttggattgaaacatacatgcaaatgcgagcttcctacacatcactctgaagtgtttatgggtttagcttcaatagctttgcaatagagacagtattcagacttagatagcacctcattatatgtaggattgtagtcgttatgaagtcattaaatttgatttagaacttaagtttactttttccaactggtctgctatttatttttttacccgatagtatctactatgttcctcacaactttactatagttgagaagtcaggttacaactgcagtgccactcagaaataccgcactgaaggcactgcatggaggaaagagaaaaggatccaaggggatcaatgttcacttaaaacaaaggattaactccaaagctaccaaccacccagacatcccccttctctatttacatgtgcaaattgcccagtggcaagcaccaagagtgtaccttttagtagaaggtactaaaccttctactaaacctatcccttgattcatttattataggggggggggggataaatgctttaatctcattactgcaatggagtagaaatataagcacttgatgagaacattttaataccagaataattttcttccttggaacaagtttttaaacaaggcacaatgggtaaattcagatataacctttatgtataaaaactggtttatagatgtatttatgggaactaagtattcctacttaggccttaggacttttccggcgtgtgtgtgtgtgtgtgtgtgtgtgtgtgtgtgtgtgtgtgtgtgtgtgtgtgtgtgttaaaaaatgtctttgtaatatttatatgacaaaaatgaagtcatatgctctaatttaggtgtaaaaggtgactgattagcactatatttgcaaagctttgtgctgcattctgaaaagaaaacacacatatctaaatccgggcacttgcaaaggaatgctcagctacagatagtagcacagatgaatctagaagacgaacatatggaggtgtagatagcttagaactaaccaataggaacataatgtaaagacaaacctgtactttaaccaaggatttctgattgtctaagtactacatgaaaagccaaggaagaggtgaagtgcgtcttactggtgttttctgtaactcgacaacatttgaggataacatcatattaaaaaaatcactgaggtattttatgtgatttttttcacaatgtctccagtcttctcaatctggtcttattctattttaggtacccgtagccatactagctgatgtctatctactgtgctgaacagatttgacctgactttcaaccactcattgacagaccaagtcacactcttcagcaacccttgatggaaaaatattatttcaggtgttaaagaaaagcataaggtggtttgattgaaaaccgataagcatccctggtaatcaacagttttaatgacccctcccctcctgccaaaacaaagaaacaaagaaacaaagaaacaaacaaacaactcaaacctcagggaaaaataacagcagatttgtctcaagttaagagcaagagttttgtgaagcaacagttttgctggttagcgattaatcagtagtgattcgccagttctcaatggttatacaggatatgtggactgggcccttctgcttgctgtgacctagtaacttcatagaacatgactggctgctgcgattactgtcagggatgaaacttggatttgacaagtggtgtatttgcacttttgttttctgaatatacagccattggtggaaactttatttcaatcaagagcccatttaaaaaaaaaaaaagtatacagttataacttaagttctaattttgcatttcatctagacattgccagaaagctgtgacataacagagattacattgaaatgtactccattccctctctaaaagttagctacaggcaaaagtcagagataacatgtgaaagtgagctggatgccaggcatggtggcgcacgcctttaatcccagtacttgggtggcagaggcaggtggatttctgagtttgaggccagcctggtctacagagtgagttccaggacacccaggcacccagggctacacagagaaaccctgtctcaaaaaaaaaaccaaaaaacaaaaaaacaaaaacaaaaacaaaaagtgagctggataactagaaatattttaaaagctgtacatccagatgtggagcctcactcccgtaaagctagcagcccaaagctaaggcaggagtgttgtgagtttgaggcaagattgagtgctggaataaaaccttttctcaaaagaaaaaccaaataaatagtaggtgttataagcagactaaatatattctttgcctggaactttaaatcacaggggatttttaattcacacatcatctgccttctaaaaatgtatctggcagtcaattcctttggaattttaatgcagtttcacagaagagagtaaataaatatgttcttttttattgtttttttttttgtttgtttggttggttggttttatttgttttgtttttgttttttgtctcaaactcaatgtaactttcttccccaggtgctgggatccaagccaggcccaacaagtgctaagtaagcactcctccagtgaactattcccaggccttatgtaattcctaaagaaatataattatgaattaatggtggttggaactgtatcactatgtagaaggaagtgccagtctggaaatagtaacatggctctaagttgggctcaggtgcgcatctctactctgtaagactctggtggtcagactgagaaactgccctaaccctatcagggagtggggcacatttccagaggttccgcagtaaggggcgggggtgggagggcagaatgagagtcatgtaccaacatagcgatgcttcaaagtctgatgcttcaggtagtcagagattcctgtcagtctccatctccgtgaacatttttcattcttgtccaatccatgcgtctaagtctttttccctctctgagaatctttaaatggtctcctttcctcctcccctcctcttttatattcatggcttcaaacaaagattttcctctttggctcacgagggatgacaagtctcctcacagcttacctcacagcatttgcttctcggcagcaggctaacctcaattaatctaacacagcctccaccaagttaatgggtaaggtctttaagccactgattacaagctgaaatgaccagagagtggaaagagggaatgggtatctgagagtcattattgtcacatttataaactttgggagataatttaaaagttaaacagtattgtgcaaaaatagcaaaaattatagatatcagtacttcacaattaacttaagttttaactttggatctactctcatacaaaagagcgcactgtatacagagggaagattctgtcacatctatgttttctcaggttggaagagaaagcagggcagatggagggaatgctatggcattatttgaattgacatttttttgggatctcctaaatgatgcccttcactaacttaaggccatcatatgatagaagatctattgtataccctgcaactagagaatctaacctcctcctcatatgacaggccagatgctctgttagcatcttctatgttttcctttttacagaagcttgtcttcgcatctaaattcagatgtcatttcctttcagaagcccaccatttaagttttaagtgtagttgaattgtattagacgctgatactgagcatggaagatttgtttttacaaagcaggggtttggcaacatgccagtagcttacttattagtttttgcaatcttagacaaactatttaacctcagttttattattctgaagttgagaccaaaactgtcttgaaagaacctgtaaggtaccaacatgaatttaaaatgcaagtgcataatatatagggaggtagcagttgttcatttttacttatctggaataacttctctagaagtttctatcttctaattgtggagaacatctctgctccactgtctgtccttgtggcctaaatacatttgcctcattctttaggacgtgattcagcatgtgacccttacctggtccagaattcttgctcagagtttggaaaacgcatgcacctatcctcaaggttactctgctgtagatgttaacttactgtaactggggactatttttgccatgtgtgggtgagcccacctatgcaggaagccatcacagagcaaagcagagcctacactgtccatgggctgtcctgatggtgtcagtttagattccacgtcttttgttattcaaactagacttggcccataagtttgcttttcttcttcttcttctccttcttctccttcttctcctcctcttcctcctcctcctcctcctccctcttcttcttcttcttcttcttcttcttcttcttcttcttcttcttcttcttcttcttcttcttcttcttcttcttcttcttcttcttcttcttcttcttcctcttcttcttctgtctctccttcaaagtagtttttgctgagttttggttacttttatccaaagggtctcttaactagtatgactagaataaactaaatgtcaaaggtaatttatttgtcctgggacattttctgaggcagaggctaagggctgattttcctagaagaataaaaccttcctcaccctaactgaaaacaaaataagaacttggtacctcaatcatagacactcttgtgatgacagatgagatataaattggaagcctcttatgtgaaccccagtagagagatagtatccatcattttaggtctgttggtggagacaataggttgtttttaatgttaggaaacattcaaggacacagtacagtttttaaatgaatacatttctatattccaaaatataacaagcttctattttcactgcagatctagaatatctttctatttctagtcaaatgccacattgtcaaaaggatatttcttcccatggcactaatgagtcatctgtaattttaagaacataagaggggagacgttttctgaacaaagagtgggtgaagctgaatgtataggcaaatggtacagtagtagctcaagttatgaaaccgacaaaaaaaaagtcccataagaaaaaattgtactcacaaactgaaatgtccttgttacacaaagtgaaggaacaaatagaaagtattcagcttcgactcataccttaaaggtcccctgaggacagcaaccatgagatggaaactcagtgcattgcaactttgctatctcctttccacttcacggttgttactgtttctttcattgctaataaaggatctctgatcacagcttaaatcactttaataattttagtagaacatttgattattacataatttgcagatcagaaactgggtcaaagaggataaaaatatgtgggcatatgtcacgataacatataccactgtcagtgacatttccactagcccaatggcattggttatctttataaaaagaacacagagagccctggcatgctacagtgccttcacacagcactctgcacatatggtgcacctgcactttagcctgaggtataccataaagaatacattctgtaaccattgtcatggtcaatgctattgttcaatatttgcccttcccaaaactcataaattgaattattccataatacaaggtgggaatatttaacaggttattggttaatgaaggctttgccttcaagaatgaattggtgcctttccagggtaagataatagacccttcttgctcctccttgccttaaacccttccaccatgtgatggtttagttcctcaatcttggactctctggtctccataagtttaagccaatccatttcttttcattataattccaaatgttggatgtgatgttacagcaggctaaagggtcttagagatttggctttttaaaatcattttacatattgctaataaatgagcatgatgatttatataaaaataactcattaaataagttcaatctaagggaagccattgatgtttgcatatttcaactcaatcttcaaaacaaatccatattcacagtttttttcagtcatggagaatctcacccttaatgatttttgaccagtagaccccttggctgcttcaactcattcacttttcccctcccttctaccctccttccctctatgtctcccattctctctctctcattcatatatatatgaaggctacatagtagtcactaaaacaaaattagtgatcaaatattagaagaaatattcttttaaaagactgagatttttactaagcaacttcaatgtaaatcagagaaaacttaatgtttatgaagattataccataagaaaacaatctatttatgagagaaaatttaagaccagtaacataatatacaggcaacctaaagaaggttttaaaacagagcactatgaaagaaggcaacattctgaatgtggcttggccatgtgttctaaagtactctatgctggacaagctgacacattcctacaatccctgcacctgtagaaaggaggagtgtgagttcaaggccagcctgggatacatagggaattgctgtctcaaaaactaaagaatgaagcacatagcgtgtctgtttaaaaaacaaacaaaaaacaaacaaacaaacaaaaaaatcttagctctagaaatgtctacctgcgctgctatccagtggctcacatctggagatctgtttggtggaagaataatgtgaaaatgaaggacatgcctttcattggaaaaactccttcctgataacaatatctctcctatcaggttgttctgcttgcacaatgtgatttgttccaaaatgtctgaatgtttttccttcttcacacaatgtgcatttgaagataaggacagctgatgtcaaaggcaggttgggggcaggggtaggaaagctgatctggctgccaagtcatcagagctgggcttacaccttgagctttttgtaaaagctttaagtatttgtcactgggttatgtgattttgttttccattttcctttatgccattgtttttaaaattttaaattcaaaataacccagtcagggaccatcatgggtagaaccacccctcaaaacagtatctttcatcaatttaaaagctctttgtttttgaaaacatattcttttgcttttatttttattatttgttgattggttgattgattttattttatttttttaagacagagtcttactattaactttggatggcctggaacttgctatttaaatcaggctagccttaaactcacagtgactctcctccctctgcctcctaattgctgggattaaaggtgtgtacaaccaggcctggtagtctggaagctctttaatttaaaagacaaaaaaaaaaaaaaaaaaaaaaaaaggatctgatagtttgatagtttgtatggtgatttgagtaagaatggctctcataaactgaaataattgaatgctcagtaatcaggggagtggtattacttgagaaggattagaaggtgtggcttgacatagttatggctttgatggaggaagggtgccatggaagagggctttgaggtttccaaagctcaggctaggccaggcccagtggttctctcttcctgctgcctgtaggtccagatataaaactcttagctacttcttcagcaccatgtctgcctgagtgctgccatgctcccagccataatgataatggtctaaacctctgaatgtgagcaagctccaaataaatgctttctttttataagagttgctgtggtcatggtgtcttttcatagcaatataacactatgacagtctggttaccacatagtgaattactatgctttttaaagtgtttccatttggtcttttattcctttatagatttataaataaggacatcgtataggggctgggatactggatttcaattttgtattttgacagggcctcctcttagtaatttttatcattaataaatcacttttatttatctttgtttctatataaataaatagtaactattaggtggtggatttggtctgtaaattggaggtgccatgtttgggggagtaaatacctgatgaggaaaaggctttctaacctggaccataggagcctctgaaacactgcatgcccccccgagaattgtaagtaaataaacacaatccatgagatgaaccaatttctatgtggaacacatctggatctttattttgtaatttcctcatattcacttctgacaaatagcaattatagaatgaacaatctcctaaattgactacttttatgtcaccttgacataagctacagtcattttggaaaagggaacctcagttgggaaaatgccccttctctagattggcctggaagcaagcctgaagtgcctttacttgactgatgattgatgtggcatggcctagcctgttgttgtagtgccacccccaggagggtggtcccaggtgctataaaaaaaataggccaagcaagccagtgagcgtgctcttcccccgctcctgcttcagttcctgattccaggttcctgccttgattttctgccccagctttcttcataatggattgtgatgtagaacggtaagctgaaataaatcttccctaccttcaagttgtcttgggtgtggatgttttatcccaagaatagaaactctaactaagacatttctctcaccccaagctaccacatatggcagcttttgtcctgacaggaactgggctaacagtacagtgtccctaaaagtttggagtattttaggattcgtggtcaatgaaacacttgacttgcttggttatatattcccccaactttaacaactggcaagtgtaattggctagatagtgtcttcaaaaagttcaagccagtatgaaactgtatcaatcttagaaacagagtctttgtagacataatatggttatgatatatatgcatatatacatatacgtacatacatacatatatgtgctgaaatggttgaattgcaatatgcccccaacaatcctatatatgtgaactataagccaaaagaaatcattttcccctaaaaacaagcaacaaaacaacaataacacaaaatacccatgtatattgcataactgtattccatgtggaaacgattacttaggaagttatttattatttataatatggcatagaaataaaaacctcttgtgttgtaaaacttccttccatgagaaattcacacaatatatttttaggtctttggtaactcagggtgacttcaacatttcaaggtacaaaaaaagtacttaaaattgcttagtccttgtaatcttcagtgagagtttttttttaatttgttaaattagctgcctacaaaatcttatacgtatatttagatttctgtcatggggcatttggggcagctccatatggtataatataatttatttacttcttatgaatatgcataaaccacccaccaatctggtctcatttcttaagcagagggattgttaagcctgtgctactttagtatgtgaggtttctgtaacagtccaatgtaaatgtagttagtggcaaagtatacctgataaaaacacttaccttcttattgatatagtaggggtccaggtcctccagaggctccgacaccatctctggaggaatgtctccatagataaatggaaggttcttcccagcttccaagtcactgtttggctttgggccattttcatcatcatcttttttgtctggcttgggattcttagccttctcttctgcaatgcgcctttcaatagctgcaagggattctctggtgaagaagttgaagctgtcaggtcctggtggtacaagcactgtttgctccatcttgtcatcctgcacattttaattactctttactcttcatgtgagattcctaaggagggaagaaccagaaacgtggagaacattaaaagttatcaatatcaataaatactcatctagaaaagtgggccagaagacttaaatttttttctcctccaaaatttaaatggaaaaaataaaaaaaatgtttacacaaattcattctctatgttgagctttggccaagcattcttgtatgtttaggattgtgctttaccaatagaggaactaggctgtgagtttaaacactggttcagtattgctctgagtacattttgataattgtcgccacatcactgataaactgttcactctgagatgtacctgtatgatgaagacgatgcccactgatagatcaatcaattcaaaggtatcacacacacacacacacacacacacacacacacacacacacacacacaaccaaaaaaaaaaaaaaaaccggaaccttgtctctgagatctaaaatgcagccattgaggcttaacaagtaaggacaaagcagtttaactttgttgcagtcaatcagaatcacataaaaagacagtcattgctacactacttatgcctgtgtacaccctgagatgtgggtgaatagatctatggcctgagaactacattagctctagtagagtctctttgacaatgacaatccaaggtgggacaaatgccattaatatggctgagatggacataaactaaactggaaaggaagctatgtgcacaggaggtagtagaaatgttcttagttcaaggaacaatgtacttttcttcaccgaaacaattctgatacatgggagagtctgcagtcctgcagatattaaggccaaatccaagatgcatccttttaaaggtatacttaataagaactcaaatttcacacatatatctgtgcccaaacttcccagagctcaagttctgcctggtacagactctgttttaatagtctgttagctcattaaagtcagcaagctcaatacaattagttgcagctttgatgtctaggtctctaatagaaaactacagcttcctcttcctctcctcccagtgttctccctccccccattcacctttccatttcttctcagagaaagtgaaacctcccattgatatcaaccctcctcccccaaccttggcatattaagatgtataagactagacatatcttcttctattgacactagacaaagctgtccaattagggggaagggatccaaagtcaaccaatagagtctgagagagcccctgctcttgctgatagagatctcacatgaggaccaagctgttaagctcttacatatgaatagcgggtcatcccatgcatgatgtcttgttggtggttcagtatctgtgagttgctatgcgaccaggttagttgattctgtaggatctcttgtgttctggatctccctggctcttcctctccctctttgacaagattccaaggtttacctaatgtttggctgtgggattctgcatgtattttcattagctgctgcatgaagccactcaaatgaatgttatgctagcctcctgtctgcaagaacagcagtatgtaattaatagtgccagaggtgggctccctctcaatgcaatggaatcactgtattttatctcactcattcattcagatcatcctgtctaggtatccctctcacctacttgatggttttgagtctaaatgtgcattgaattctatcttagtgtgtttatttgttcttctccttttttttctcttattctataaaccctatcttttggtttgtttatgactgttgagtttggatctcagcatgcaccaaaggtggagtggaacttgctccatggctcatactggctttgaaattgcaattatcatgttatactttcctaattgtttggattgtggtcttgcaccaccatctctgattttattctatcaattctagtgctgattctacttatttgatgtgtagataatacttatgatctgatatttggaagtgaactgaactatttacagccttatgtcacttaaaagcatgagtatatattgagaaaaaaatcagtagatgattttaatgtggaaacataatagaatacttaaatggacttacgtagtatagacaaatcactcaacattaatgcatcaaagagtccaatattcacgagacgtatgaagctgctatcagcacagtgtggcctgctcttttattaccttaaacatctttattagtagaaatatactctaaaatatgattaaaaagaatattatagaaaatccacaaactcttgacagagctgctgttatcatcatcgagtgttatgatacaagcataattgaaaggctgccatgatctatgggactggcagcagaagatgtctgtggatgccaccattacctcacatgtcctgtgttgtgccatgagtttaggatggatacatgaataagtattgggacttctaagctccactcatggagccagctttgagttgcaatctgtctgtgaccaaggcaccagtgtgcagtgcttgataatcctgccgagcacatagatctttgcttctctctctctctctctctctctctctctctctctctctctctctctctctctctctctctctgtctctctctctctctctctctctctttactgagaacaaacgtaaacacatatataagggcatttgtttgtttgttttttctcgtttgtatttctttgctgtttcataggtttagcattatcttttgtatgcaaatatttaaattttggattgcagcataatttaaatacatactaattgcatacaatttcagtctttctgaaagggtgcaacaacagggtccatttttcataaaattgtgtggacagaacagaagtggctacttcaagccttcctattcagtaaaaatgagcaacccacaagacctaacagtattatggtgtgcttacagccaggagcctagcatgtctaccctcagagaggcccaaaaagcagctgactgagacagaagcagaaacttacacccaaccaattgtctgaagtcagggacccctgtggttgaattaggaaaaggctgggagaagttgaggaggagggcgaccccataggaagaccagcaggctcaataagcctaggctcttgagatctctcagacactgagccaccaaccaggcagcatatactagctcatccaaggtcctggacacatgtacaagtaggacttcctggtctggcctcagtgagaaaagagcccctagctcttgagagacctggggctgcagggaatggagagacctggcaggggtgttggggggagtgtggggtgtggagaccccttagagatgggggtgggagggtggggaggagaaatgggatgaggaactgtctgagggcagaatgggagggggataacaacttgactataaaagaaaaatattaaatataattaaatataaataaaaagcagtataagaaaaaatgaaaaaaaaaaaaaaccttagggctattggctgtcagtatcaactgagtaaacaaacagccaaaaagataggcaaatactactgatgaatatgaccacttcaaatttattgttataataatgacctggttcagttacagtaattacactcatatgtgagtaatttaactaaatactatactgataacatattcaggttagggggaaagtatttcttactttctgattagaccttgtattcaaatactaccaaaaagtaaaacataagttatattaattataagaataataccatttcaagattgtgatctggggctaaagagatggctttgctaaaggtgcctgttcatgcctggtgaccttgagcttgctgtctgccccacagggtggatggagatgactgattcctgtgagttctcctctaagctccaccatgccacttttccatctccctccctctctctgtctctctctgtctctctctcttaaacaaacacacaggtacacacacgcacacacagatactagctaagtaaacaaataactgtaattttaagcatgatgacctgttccataaggttgcttatgaaatatctgaagctgtcaaatatccttcaatattaatgttttcaagcaatattatgggcaaaaatctatagattttagtttgaacttctactttctctatccagaaataaccattaggatagaaagaaaaagtttggatttttaacttaaaatttttaaacatttaaactgaaaactgagaatggtccccatttgtggaaacacatgcctcattagagatgtctcatttgaggaccatgtggcttgaggcttgtggcggtctctttactttagtgtgactttggatgccttggttacatagagcagcccgtgtacccttcagtagagatagccaacaaatcgtggtaagaaaagtgtcaaagagagagtaatattttaaagaaaaatataagataagaacttattcaaaatgcaaactcacatagttatgaagaaagaaaaatgatgcatttcattaacagacatacttaaaataataaaaagaagtaaattgccaagaaaaaaatgaattattcttttagaaaatacttttaaaaattaaatatagacaagtcattcgaaagaaggcaacaagaaacagtaaaatctcctaaagacactggaatagaagtgaggacctgagggctggagggatggctcagaggttaagcgcactgactgttcttctagagggtctgagttcaattcccagcaaccacatagtgtcttataacctctgtaatgggaactggtgtgtctgaagtgaataccacatatgtactcacatacataaaatgagtaaatcttttgaaaaaaataagtgaggaaaacatttaaaactaataaaaatttaattcacaatgggaaaaacagggatgaaagagaaataagaatgaattacttcattcaaataggaaccttctggctttatcgtcaccaacaattcatactttatcgtcaccaacaattcatactttatttctataacttttaaatgtttttctaaacctggtaatcccagctatcagttaatatggttattcaatatcagtacatcttagctatattatgccacataattttatgtgtgaagcaatgctatatgtgtagtgtcttctaaaatagcatggtatttatagtgaaaattagctggattcttgctaacatgatggtcagctcctgcaagccttaccactattttgaggacatcagtcctctagatagcacccttcttaattaaatttttggtctactttgcaaaatattctactgccaaaaattaaagtcaggtgaaatattattcttattgatattatctcacaaaaataactaaaatatttattagtgtgtgtgtatgtgtgtgtgtgtgtgcctgtgtgtgcacaagtgcattaagtgtgtatatggagacttgtgcggggcataaaactggaggtcagagagcaactttgaagagctgcttctttctttgtaattttatgtaaattcctaggattaaactctagtcaacaagtgtctttgcccactgagccatctccctgatcacttaaccactgactaattctataaggcttgcattgtacttagtgcattctttgttcttgaatcaaaaaccaaaaccaaagggacacaaattgaaaaggaagatgtcaaaatatcactatttgcagatgatatgatcgtatagttaagtgatccctaaaattctaccagagatctcctaaacccgataaacaacttcaacaaagtggctggattataaaattaactcaaacaaatcagtagccttcctctactcaaaggataaacaggctgagaaagaaattagggaaacgacacccttcacaatagttacaagtaatataaaatatgttggtgtgacactaaccaagcaagtgaaagatctgtatggcaaaactttaaatccctgaagaaagaaattgaagaagatggaaaaatctttcatgctcatgattggcaacattaatttagtaacaagggacatcttgctgaaagcagtctacagactcaatggaatccccataaaattcccactcaattcttcatagagttagagcaatttcaaatgcatttggaataaccaaaaacccagaataatgaaaattattctcgacaataaaagaacttctggggggaatcaccatccctgatctcaagctgtactgcagagcaattgtgatttaaaactgcatagtaatggtacagtgatgggcaggaagatcaatggaatagaattgaagatccagaaatgaaacccacctacctatggttacttgatctttgacaaaggagctaaaaccatccaatggaaaaaagcattttcaacaaatggtgctggttcaactggcagtaagcatgtagaagaatacacattgatctgttcttatctccttgtacaaaacacaagtccaagtggaccaaggacttccatttaaaacaagatacactaaagttaatagaagagaaagtggggaagagccttgaacacatggacacaggggaaattttcttaaacagaacatcaatggcttatgctctaagatcaacaattgacaaatgatatctcataaaatcgcaaaacttctctaaggcaaaggacactgttaataggacaaaaggcaaccaacaaattgggaaaagatctttactaatcctaaatccaatagagggctgttatctaatacatacaaagaactcaagaagttagactccctttactacagagcaattgtgataaaaacagcatggtactggtatagagacagacaagtagaccaatggaatagaattgaagacccagaaatgaacccacacacctatggtcacttgatcttcgacaagggagctaaaaccatccagtggaagaaagacagcattttcaacaattggtgctggcacaactggttgttatcgtgtagaagaatgcgaatcgatccatacttatctccttgtactaaggtcaaatctaagtggatcaaggaacttcacataaaaccagagacactgaaacttatagaggagaaagtggggaaaagccttgaagatatgggcacaggggaaaaattcctgaacagaacagcaatggcttgtgctgtaagatcgagaattgacaaatgggacctaatgaaactccaaagtttctgcaaggcaaaagacaccgtcaataagacaaaaagaccaccaacagattgggaaaggatctttacctatcctaaatcagataggggactaatatccaacatatataaagaactcaagaaggtggacttcagaaaatcaaataaccccattaaaaaatggggctcagaactgaacaaagaattctcacctgaggaataccgaatggcagagaagcacctgaaaaaatgttcaacatctttaatcatcagggaaatgcaaatcaaaacaaccctgagattccacctcacaccagtcagaatggctaagatcaaaaattcaggtgacagcagatgctggcgtggatgtggagaaagaggaacactcctccattgttggtgggattgcaggcttgtacaaccactctggaaatcagtctggcggttcctcagaaaattggacatagtactactggaggatccagcaatacctctcctgggcatatatccagaagatgccccaactggtaagaaggacacatgctccactatgttcatagcagccttatttataatagccagaagctggaaagaacccagatgcccctcaacagaggaatggatacagaaaatgtggtacatctacacaatggagtactactcagctattaaaaagaatgaatttatgaaattcctagccaaatggatggacctggagggcatcatcctgagtgaggtaacacattcacaaaggaactcacacaatatgtactcactgataagtggatattagccccaaacctaggatacccaagatataagatacaatttgctaaacacatgaaactcaagaagaatgaagactgaagtgtggacactatgcccctccttagaattgggaacaaaacacacatggaaggagttacaaagacaaagtttggagctgagatgaaaggatggaccatgtagagactgccatatccagggatccaccccataatcagcatccaaacgctaacaccattgcatatactagcaagattttatcgaaaggacccagatgtagctgtctcttgtgagactatgccggggcctagcaaacacagaagtggatgctcatagtcagctaatggatggatcacagggctcccaatggaggagctagagaaagtatccaaggagctaaaaggatctgcaaccctataggtggaacaacattatgaactaaccagtaccccggagctcttgactctagctgcatatgtatcaaaagatggcctagtcggccatcactggaaagaaaggcccattggacacgcaaactttatatgccccagtacaggggaacgccagggccaaaaagggggagtgggtgggtaggggagtgggggtgggtgggtatgggggacttttggtatagcattggaaatgtaaatgaggtaaatacctaataaaaatggaaaaaaaaaagaaagctcagcactacaaaaaaaaaaaaaaaaaaaaaaaaaaaaagaagttagactccagagaaccaaataaccctattaaaaatcgggtacagagctaaagaattctcaactgaggaatcccaaatggtagagaagcacctaaagaaatgttcaatccgggcgtggagaagcacgcctttaatcccagcacctgggaggcagaggcaggcagatttctgaggtcaaggccagcctggtctacagagtgagttccaggacagccagggtgatacagagaaaccctgtcccaaaaaaccaaaaggaaaaagaaaagaaaagaaaagaaaagagaagagaagagaagagaagagaagagaagagaagaaaagaaaagaaaagaaaagaaaagaaaagaaatgttcagcattcttagtcatcagggaaatgcaaatcaaaacaaccctgagattccacctcacaccagtgagaatggctaagaccaaaaactcaggttacagcagatgctggtgaggatgtggagaaagaggaacactctttcattgctggtgggattgcaagctggtaaaaccactctggaaatcagtctgttggttcctcagaaaattggacataagactacctgaggacccagctataccactcctgggcatatacccaaaagatactacaacatataacaaagacacatgttccactatgtttatagcagccttacttataatagccagaagctggaaagaacccagatgtccctcaacagatgaatggaaaattggtacatttacacaatggagtactactcagcaattaaaaacaatgacttgatgaaattcttaggcaaatgaatggatctggaggatatcatcctaagtgaggtaacccagctacaaaagaaccacaaggtatgcactcactggtaagtggatattagaccaaaagttcccaatacccaagatacaattcacagatcacatgaagttcaagaagaaggaagatgaaagtgtgaatgcttcagtacttcttagaagggggaacaaaatattcatgggaggtagagggtaggggtgacttgggaggaagagaggaagaggagggggaaagggaggcaggattagttatgagaggagatggggatgatatacagaggggcaggaatttgaacagaggtgtgtagcaatgggggatagggaattggggatatccatcagcaagtcccagatgccagcaaagattggggggaatgagaccacccactcatctcaaaattcttaacccaaaagggttttcttgtctaaaggaaatacggggacaaagtgtggagcagagactgaaggaaaggctatccagagactgcctcacctggggacccaacccatagacagacactaaacccaaacactattgtagatgctaagaagtacttgctgacagaagcctgttatagctgtcccctgagaggctctgccagagcctgacaaatacagaagatgcttgcagccaaccattggacttagcacagggtctctgacgtaggagttggagaaaggactgaaggagctgaaggggcttgcaaccccatagggagaacaacaatatcaatcaaccagacctccctgccccagagctcccaggaactaaaccaccaaccaaagagtatacttggagaggtccatggctctagctgcatatgtagcagaggatggcactgtctggtatcaataggaggagaagcccttgatcctgtgaaggcttgattttccagtgtaggggaatgccagatcaataaggtggtagtgggaacattctaatagaagcggagggagtagggatgggagaggaaaccagaaaaggggataacatttgaaaagtaaatacataaaaatccaataaaaaagtagacaacaaactaaaacaacaacatcaaaagaaagaaaggaagaaagaaagaaggaaagaaagaaagaaagaaagaaagaaagaaagaaagaagaaaaaagaaaagaaagagaacaaaattttttttttttaggtcaggatctcttttcctaaccctgactgtcctggaattcattgtccagatcaggctggccttgaattcacagtggccttcctttgcctcctgagtgctgagattaaaggtgtgcaccatcatacccatcctcaaaagctattttgacagaataaagtgctgatatgttctcagatcaagagcctaaaaaccattaggaaattctttatatactatcaatttttgagaaatatacatttgtataagctctgtttttatttgtggatgtatatatgtattttttctgtgttatttctattatgtagtctttacttgcttgaagtttcagtttaatgataaatgccctcttctctcttgaaagtgtcttaaatgtatctcaaatatgatgccaaatattctggtgtaggggagagaatgatatggatgagcagtgagagtctttaggttggtaaggagattgcagggtcataaacaggatgacacagtctaacagggcaatacacccagatgaaaggtgtagcccagattaaaggtgtgttccttaaactcggagattcaatcttctggaatccattgccactatggctcaagatcttcaaaccaagatccagataaggatctccaagcctccaaataagggtcactggtgagccttccaattccggattgtagttcattccaaatattgtcaagttgacaaccaggaatagccactacaatccaccccttgtcaacttgacacaaataatatctcatgttcacatgaaacaataacaaggttgtaaatatgcctaacatgatataactatctctcgtacaatcgcaaatgcattagtaaatttacaatgggcattcactaaaaagacagagaggccaagacgggtttgatgaggtgaagtggcacttcttgatattcagtcggggctgatacccaaatatccacttagttggaggagaattattcacctgggtgtttaacctgcaggcctccccaaccagtggaaatcctgctatgctcttcttgcccttgtataattttgagtaatagacttttgtgctgatggaatgagacttataaactctagtcaagctttctctgaagcactgtgtgtctacatagcctcatgctctaggtcctttgctctgagaatggtatatctcaaatgggtgcttcttcctcagtctggatcctggaataagaagacacattcactggatgtcaagagaaagctaataggactcaaagggtctaaaagtaacgatttatcagtgatgtttgacagtgatattactaacgagcaagtgtatgccattgatcaaagaccaggctgctaaatgagttgaattaattaggaatatttgtctctcagacacaaatgttgccagagattagatattccacacctcatgagtctccacctatagttctagatgaggaacacattatcattaggcaatcagtgaaatcatggccttctaacaatcatatagcaactcaggaaaatttgttcaaaggatgctaaatagcctatatcaagaatacaaagagtgggctggggagtagttcattagtaaagcagttgccatgtaagcatggatatctatgttcagatcttcagtacccattgaaaaagctgcagcatcatccaatgcctagaattccagtgctggaggagcagagacaggggcatcatgtgggcctactgccctgacagtccagctgaatcaagaattttaggttcagtgagagatcatgtcacaaaaactaaggtagaaagcaacagagaaagaagtgtgatatttatctctggtctctctatgcacaagaacacacacacatgctcatacacaaacactccacactcctgggtatatacatgtctacactcatgagcacatacatgcataggcacaagcacacactcccaaacagggatacatacaaaaacacacaacaaagaatatgtattatcaatcagaagccaattatttaagttaagtagtaaaaaattcttctactaaaaagacaaccgtaccatggtgaggaaatggtccagtcaatgatatttgctagaactgtcattgtccatccatgtgtctatgctgcagcatttaagatatcaagaaggagctggcctagtgagaacagaaaatctaacatggctgctatagcttactgactagaagttaagtgcacacttcctaaaagaaggctttgacacaagccacttcagttccctcctcattttcttgtccccattcctctctctgtagaattctgagatttcaattcagttttatacagaaaccacattactgtaagccctacaaagttatggcaatatagctatatggagtcaagtaatgtaggttatttttttcccaatggtgctggtgaaggtggcaattatgtagctatacttagcagactgaggaaattctgctagagtcagcatttgtctcttcattgctatgaaacagtaatggaaaaataaacaaaaacaaaaggcaaacactatgcataattccctcagatcatattaacatgtgatgttggagtaaattgttataaccccattttggaaatacttaccttaattaactatgatttccttaaaataatgcagtatttacaatctatatgaaagcactatatgggacacatggtatgatggaacagtgcacccaagagacaccaagaacattcctgtctgtggcagtcttttctctatacagaggcatttagtctcaattgctcagagttattttacgttttcagtgactttcactgttcattcgtgtgcatattgcctggacaacacaggatgaaaaatggtccaagagaagtctttgacttgctaaagcaagaaagatgtttaaaatatgcgacacatgaaatatcccaaaaagtgtagaattctttttgagaatgttgatgtctctttagcataaagctaatttgaaggtgtccttcttatcctaatattttcttacaaaaccagctcatctcaaagcaaaagtgttcaagatatagttgatggagtaaggagtttagcacacagaacacagggacagctacagagaaacagcaaatagccaaggcagacataaagaggctgacaagacatgagagagaagagtattaaacacagatcagctacctggaaaatggctctctggtgttccacacttcctctcatctggatgatctagaaacacagtaactgctctgagttaagaaagcctgagaccagcagtgtgtgggtggcctgcattaagttgattgataaacattctacatataaaatctgtacccttcacaagtttggtcaatgacacaattctattgtaataccatagactcatgttcaaagaagaatcatttaaggacagagtgtgctgaaagaatgtataggaaataagtcacaaaagatgacataatttcttgatttaaaacctcacaggatcataggatcagaggtgaggaggacacaacatctgtcaaaacacaggaattaactaggaccaatgggacccaggcacacaggaactccaccagatcagtggcacaagttccttctggtctgtctgggtcagtgccctgagcagaccttgggcttgaacttcacagccagtcccacaacacccagaggaagctccactcccaagtgctctaacatgccgaggatcacaggatcacagaagcttggtcacaccaggatctcagggtcccagaggcagcttaactcccaggagctctgacccattcaggatcccagaaccacaggatcacagagacagcttgattctgaggagttctgacacaaccagtatcacaggaaggatgagctccagtcagatatagccagatatatcaggtagcactagagataatcagatggtgggaggcaagcataagaacataagcaacagaaaccaaatttacttggcatcatcagaacccaattctcccaccatagcaagtttggatacaccatcacaccggaaaagcaagattcagacctaaaatcacttctcatgatgatgatagaagactttaagaaggacataaataactcacttaaagaaatacagttaagcaggtagaagtccgtaaagaggaaacacaaaaatcccttaaagaattacaggaaaacacaattgaacaggtgaaagaaacaaacaaaccctccaggatctaaaaacaataaagaaatcacaaagggagacagctctggagattgaaaacctaggaaagagataaggagtcatagatgcaagcatcaccaactgaatacaagagatagaagagagaatctcaggtgcagaagataccatagaaaacattgacacaacaatcaaagaaaagacaaaaagcaaaaagctaatccaaaacatccaggaaatcaaggacacaatgagaagaccaaatttaaggataataggtatagcagagagtgacgtgttccaacttaaagagccagtaaatatcttcaacaaaattatagaagaaaaattccctaaagaaagagatgcccacaaacatacaagaagcctacagaactccaaatagactggaccagaaaagaatttcctccagtcacataatcaaaacaccaaatgcactaaacaaagaaagaattttaaaagcagtaagggaaaaaggtcaagtaacatataaaggcagagctatcagaattacagaagtcttctcaccagagactatgaaagctagaagatcctgggcagatgtcattcagactctaagagaacacaaatgtcaacccaggctactatacccagcaaaactctcaattaccatagatgaagaaacgaagatattccatgacaaaaccaaatttacacaatacctttccacaaatccagccctagaaaagataatagatggaaaacaccaacacaaggagtgaaactacaccctagaaaaagcaagaaagtaatctttcaacaaacggacacaaacataattccacctttaacaacaaaaataacaggaattaacaatcacttttccttaatatctcttaatatgaaaattaatattaccaacatatcttaatgaattgaaattcaaatatatgaggaattagaaatttgtcggctgtcttccagtggtctctctaatttggtaatgggagaaataggtccaatattatacaatccatatacactttctgcttgtttgtatatgacaaagtctagctgtgtaccacacaatggtcttgaaatcatgcttctcctatctcagcatatctatttgtaggattgtttatttaatgtttttacactactctatggttttcagaacagcttacatatttcaaaatcatgtatacagcccaaagaaatatagaaaattaatttgggaggtagcttgtaagagaacaacaaagagtgagactgaacttttttttgatatttataattattgtatcaattttgaagaagaggaccttataagttactttttttctgatatgaatgtttttcagaattatcacagtcaaaggaaccagaatcttacactcacctaatgtctgtgccaccctccaagcagagccattgttcattgaaacaattgatgaatgactccatggatagaccatcttaatacacaccatttcttaaatgaatgtaacctgctccctgtaggctgagaatgatgacaatcactcaagtcaaatagttttgattatagaaggaaatatgtatccaaataatcgtgcctgcaattcattccttggtgcagcagaactgtcaactcttagcttaactactatggaggtaaaatcctttggtgatgtgagggacattgaagtacagactaattacaatgaactccaatatctaaaaattgttcttattttgggtttgtaccacagtaagagtcaagattttaaagctctactaaaaacaaaacaaacaagtaaacaaaatgactttatttatgttcatttaataacatgtcgatcattttatgattggtataaaaatatatattgtgctgaatatgataaaaaattagttcacttaaaaataaaataaagactcactattttaattgcctctatgcagcatttatcatatatgatatcaaattacatctaatttattattcaaaactatactggttagctttcaatctgacagttaaagtcagtcaaccagtgtttcttttgtgatgtactggactgatttatagagacccttctgggattcttagctttctgtgtggtcaccagctaatgactgtcagctctgtacaaaggacacactaccagatgccaggacatctgtcacagcagctaggacacagagccaaatctattcttgtcttgatgtatgacacacaatatgtacaatcagttttgttcattttgaaagtattctttaatatatgctacagacaagaccctgcaggacagtgaagaccgtacggtggcagggggagtggaaaataacatagtattgggatcttgagactaaagcaattttcttcacaagattctttatgaaatcagctctgagattttgatttgttttggaattttgatgtttctgaccttaatggagtgatgtattagtcccagaataggtgaaaatgaaggttaaacatttttggcatcaacttaaaatacagaaaacctcttttgacttcttgagtctgtttgtatgtgtgtgtgtgtgtgtgtgtgtgtgtgtgtgtgtgtgtgtgtgtgtgtctgtgtgtgtgtgtgtctgtgtctgtctgtctgcctatgcatctgtgaaaaggcaaggagcagtaacactatcctgaattattactaatttatttaaaggtaaaagaataaacatcatgtaacctctcttaataaatctcacataaagtggttttttttctaacaatagattcacattttaattcttatttcaattaaagaacttttgatgcattaagctcaaaaccataaacatgtcagataacagaacattaagttcaaggaatatcctacactctttagttctaactagttttgaagttatgttcctttttctcatagatcaaatggtgaaaaactataaaatagtactattaatatacatatgagagatttggtttctgaatctatgccttttctcctactcagcatgtcttctaacattttttggctatttttttattggttattttatttatttacatttcaaatgttatcccctttcctggtttcccctcaggaaacctccattctatcttctttccccctgctgctatgagggtgctcacccacccactcctgcctcactgtcctagcatttccctacactgtggcattgggccttcataggaccaagggcctcccctcctcctgatgcccaataaggtcatcctctgctacatatgtggctaaagccatgggtccaaccatggttggtgttttagtctttgggagctctgggggtctggctggttaatatttttgttcttcctatggagttgcaaactcattaagctccttcggttcatcccttaactcctctattgtggtcccaatgctcaatccaatggttggctacaagcatctacatctgtattggtcaggttctgtcagaacctctcaggagacagctatatcaggctcctgtcagcaagcacttcattggcatcagcaatatagaaaatgtggttacatttacacaatggagtactactcagctattaaaaacaaggacttcatgaaattcttaggcaaatggatggatctagagtatatcatcctgagtgaggtaacccagtcataaaagaacacacattgtatgcactcactgataagtggatattaggaataaagctcagaatactcaagatacaactcacagaccacaggaaactcaagaaggaggaagaccaaagtgtggatgcttcagtcctacttagaagggggaacaaaataatcactgaaggtagagggtgggagggacttgggaggaggagagaagggggaagaggaaaaaggaggcaggatccaaaatgggaggagacaggggagatgtagttcagatgacaggtcaggagtttgaacagaggtgtgtagcaatgggggatggggaactggggatatccaccacaaagtcccagatgccaggaaagcaagaggctcccaggactctatggggatgaaattagatgaaatacccaacagaggggagagacaacctgtagagaacacatctgaggttaggcatggcccccatttaaggatgtggctacctacccatctcaaacattttaacctagattttctcttgtctaaaggaaatacagggacatagagtgaaacagagactgaaggaaagaccatccagagactgccacacttaggaatccatcccagatgcagtcttcaaactcagacactattgctaacatttcttttttgtttgttttgttttttgctttttgtgttttcaagacaggttttctctgtacagccctggctgtcctggaactcactttgtagaccatgctggccttgaactcagaaatccgcctgcctctgcctcctgagtgctgggattaaaggcgtgtgccaccacgcccagctcaacatttcttaactatgaaaaaaataacgtttttgttatgctcaacagcaggtggcagctgacaaagtataattgtatgtggtcctgaaacattgtaaataattttaatgttattataacattcaacaaaaacacccaaattatttttccttctacttaaatctcaaaattatgctaccatctctaatctcaacacaataagtgaattctgaagcaactaagctaggtggggcattattggttttagtttagaaagcacgcacagttagtctactgtagcagtgcccatttgtggaaatttctgctcctttcttcatagactcctgggtggaagaaaagtgagacctcaacaacagcacttcatctggaactcaacttccagaatggagattgaaaaatataaatcaccaaaaccaaaggggagttttatgtcagtgagtccatgagagtataaatgaccacaatgacttaagaaatcctcatagaaggtaggcaagatggtttggtatataaaggatacttgctgtcaaatctgatttccagccctggagaccaatgagtgaagaagagaaccctcttctaccagccagttgtcctctgacctctgcacaacacacacacacacagggggggggggggagggagagagagagggggagagggagagggagagggagagggagagggagagggagagggagagggagagggagagggagagggagagggagagggagagggagagggagagggagagggagagggagagggaagtgtaagaaattcaaaagacatccaaatgggttgccagaaaaaaatgcagttacgtttgtatttgtaataaacaacactatttttgtacttcagaataaatagcaggacatctagctatactgatagttaattattgtttattcgaaattcacttttacctggacagcttgctaatttctttgacaagtctggcacgcttacatctgaggaaagtctaccattctaaaatctctctgcaacttgcctgaaatccagttaactcactttagcccttcagcttaatataaattgccatttgaaatacacacatatgtctgaggcatacatgagctgctcatgcatcaccgtaaattaatttaaagaaatttaaaaagactgatgactgatttcttctcaatatctaattttttttttgttaaagaaaattcctgtgaagcagctgtatgtgcaaaggttgtgaggctgactaaaactttaaaaactgtggagggtaagggatgttgctgaaccaggaagcttacttcaagtttccttggagctatctttttttttttttttttttttttttggagagtagattcttaaaacatccttaccacaatatatcctcccttcactcttcccatctcctccctacatcttctcccctgcatatccactccccctgcatttcttcttcagaaaagaactggccttcaagagagtacagaagaatgggacaaagcaagatacaataagacaaggcaaaagcccgcctatggaggctggaaagggcagcccaataggaagaaaagatccccaagagcaggtgaaagagtcagaaacatacgcactcccaccattaggaggtaccacaaagacaccaaactcacagccataacacataagcagaggacccagtaaggacctacccaaatatcatgccattttagtctctctgagcccctgtgagccctgcttagttgactccatgagccaatgtttatcctctctgactcctaccatctttacccacttcttctagttctgaggggttctcctagctttgaagagagagatccaatggagacctccaatttaacctctctctcaacacaatgttttactctaggtctctgcacctactcctttggggccatttttctaccttaaggagacactccttgctcaactctatatcagtcctaacatgttgataagcagattttaaaaaaataaataaacaacaacaacaacaaaaaaaaccaaacaaaatcactaccactacaacagcaaaacctttgtaatgtattaacaaaattttattcccaactaacggaagagctcagtagttatcagataacatctgaggcctatctgcctggctgcagtctgcttctctgatatacccaccaatgaattttaaaattaccttgattcatgacttttacttttctgctattatagaacttggtgaaacagtatccacattggaacatggaattagggtaacttagtaccctgtttgtaagccatggccactcaaatttggctccaaagtaaacaatctcttattccctttgaatggtatattagttgcttttctgctgctgtgataaaacactgtgaccaaggagagttacagaaaagggagtttattctagtttatggttccagagaattagagtccaagatggtggaatgaaaacaagggagatgaagaagtaactgagcgctcacatcttgagcaacaagcaggaatgacaagcattttttgtttgcttgcttgcttttggcaaaacaaaacaaacaaataagaagctctcaaagcccagtcccaggaacatacttatccaggaaggccatacctcttatgactccccgaggtccccaagtggagactaatcgttcaaatgcttgaggttgggaagtgtatctcacccaaatcttcaaaaggtgggagctctattttttgtatcaatgtttgccatgactaattcgggtctgaggatataggagatttggtttggttggtctggttttgaaaggggaagaacacaggattgtctgtgaaatgttaattcaaactcattttaacggttctgttcttataggattatcatgtgtcagggaatgctacattgaaaacatgagtttggagaaatgaaatgagatgtaagttaaaagatgtaaagtaggggatatatagggcggcaagtgtgagagcaaatgtgtaacatgaggacaatagttaatggaatggtgtcatagtcaagattttataaagagtacttagctggccttgtcaaaaaaagtacctatataaactgatagacacatttatctgtttcatgacagtgaacaattttaccattctgtacgtatccaataagatcatattgatgctttaaatgtacacagtaggaactacttgccatcaaagaaagaacaataagtatgacatgatagagcataagaaagctctttgactccataatttaacttgaaatatgaagccctcagaagtagagctgttgtagattatgagaaatgttataacaggggcaattgattttcataaacgatggagaaagtataataacctagtaaacaggtataatttattccatagtttgatttttttctaagaggatgatttctcttagaataagttctctttggagaatgggcagttattattattgatgtaataaaaataaaattactctgtgtttctggaggagaagatgaagaagaaaagggtgaagaaagaggaggaaggggaaaaggaggaggaggaggaaggggatggggggatggttacaaggggcaaaatgttcacagtgagtttatgggtctgtgccttttttttttttttgtccacatggaagtcttgttgtccacgttggaaatgcagatttctctctgctccagacataatggagatgaatgcctataagtaagagctctgtcattaaacatggatcagacattccccaggcacaatctaatagaaaagaaaaacagaaaaacagaaaggagtcagaatagggggatcaatctgaagaagagtggagtgaaacggtttggaaatcgaaaaggcaacacaaagaataatgacaggtcagagaaggtgacaggcttaaaagatacaaccaaataattccattttcatgactccatggtgaagatgaaagaagcagaagccgtttcaaaagctaagccaggcaagagacttgggcactgaccccaaggacagtctcacagcactcacaggtttcaagtccatctcagttcttggtgagacagtggtcttccattgcacaggtctgtggcagtgaaaattcctatttagtcactctatgggaaccagagtgtaggctctgaaagatcttgaaagtctattgctaaaaattgagctaagaatggaaggctacgaatttgggaaggagaacttaggagagcacaacatgggaggagttagaaagatgagaaggaaggggaactatgcaaatgcagtattcacctacatcattttcaatgaataaattttatttatttatttacttatttgaagggattaaaaacaacaacagaatcctgagataaacagggaaagaaagcgcgggggaaaaaccataaccctgagagtctggatttggcctgccacagacctagagtagaagaggcccaggaaggacaagatgtcccatggagagcaggatgcccgctgctgataaactacaggttcagttggaagggagctcagtttaggcaggaagtaagtgcataaggaaagaaagccctaccattagtatctgggaatagttctcatcaactgagagcaaaccttgtatggagaactgagtctgaaatcagtgggtagatgagcagcatgaaccatttctttgcctgatggccacagagcctgagaactcaagttccagccatgaaatacagagctatattctactagtaggctcattgataaacttagaagttcttgcatgcatgaagacaggctctccatctatctagaaaatgtcttctatggtcacttagcacatgcccagtgcacttgggagatacctcacagctaagacattggctatctcaggggatgcaatctggattgtctcagtggggtgacagcattttcccagcacacagacttaaaacctgtgtactctgatatacaaagggaagccaccaatctgaaaacaactctggtaaccagcagagagtgtccaacagagcatcaggaaacttaaactacaggcaagacatcagcccacagtttaaagggctatgatccccaccatgtcatgtaactggtaatctccaattttctaggacctagaaggaatccattccagcacttcgcacacacaccccttctttttaactctggggattcttcactttccctcttgtcattgttaagctgttagaggcacttttattgtagtcttaaaatttgtcttttattctcatcatttaattatctcattttgtttatgcatatttttcattattgggtaatcttgatttttttttcctttttagagtgcttcttcttattccttatccttttagaagtattctgatcttaccttttattattttaactggaatttttaaaaaaaattttttttctaacttcttaccctgtcctattcttctttatgatattcatctccacttggttcgttttttcctctttaagtggtcttcacatctctactcccttttctgtctccttccttatctctttcacttactgcatccacatttacctcaactaaagagtatgactagatcttgaatggtttgatgttggtgctgttagagcagtttgctctctccactctaactggaactggtgaccaaactctccagagtaagctgcttagccccatgtggtggaacataactgtggttgtagaaccgagggggctgaggcaggagcttagccccgtgtggtggaacataactgtagttgtagaaccgagggggctgaggcaggaggatcgggctttcaggtcacactttgctacatagtaagtttgcagccagcctccttgtgagatgtctccaaacacacagaaacaaaagaggaaaaggagaaaaaaatgactgaggtattcaatatgaaatactcaaataaaacttcaagagatgggacaaaacccaaaggtataagaagtgtagcagagaaactcaagaatgtgtcaaaggaaacagtatttcccccaaaaggtcataattctcggcttctcaaaagacatggagatttgttaacatctagatgaagacttcacaagtttatttgatcaatgaattccgagaggatacaaacaagcagatgaattcactcttgtatttgcggaggaaagtcaacaacacagaagaatatgacagtgggactgatgagcaaaactctaaggtacacagaaaatgtcagcaacatgaaagaaagattcagaaggaaaattgagtttttaggggttttttttgtttttgtttttaaatgaagaaaccaaaagaaaacaaacaagccattggaaaaccacacgacaaatgatttaatgaaggagaagaaggaatattactgaaacaacaaaaacccactaagagaacagacaataacaaagcaattttacaccaactaaaaaaagaaacaagtaacaaaattataggaattagtaaacatctctcaagaagaataacattatatgtatatagccagaactcactaattaacacagattggccacctagatgcctgtatgaagacaaattaacaacaacaaccacaataaaaacattgaccctgttactatctccaaaaaccacaccttatgggtaaagtcagccactgttggagaatgagacaatctaacaagtgagtgaaatctgaaaagaatttagctgtcctacatttaataaggtagacattaaaacaaattagacagaagacataaagaaggccaagtgagcaatgaaagggacaactaattaagatggtatattaattgaggcaggcatggtgtcacacacctagcacacggtagacagaagaggccaatctctgtgattttgaggccagtctcattaatagttccaaaacagagctacatggaaagactgcctcaaaaaggaaaaagagatggaggaggagaaaaaggaggagaaggaggaggaaggagaagaagaagaagaaggagaaggaggagaagaaggagaagaaggagaagaggaggaggaggaggaggaggaggaggaggaggaaggggaagagacaaaacaaccgtagatacacatcaaattttagaattcttaatttcataaaacactaatggagacaaaatttcagatacactcaaataataatagttgataattacaatatcatacaataatttttagatgcattactcaagctgaaggtcaataaagaaatttaaaatataaataggacaaaatgacttaaaggatatatagagaatattcaatccaacatatgtgtttataaaagatacacattgttctcagccgcctatggaagcttcctttaataggtaacatgctacatggcaaagcaagtcttaaccaatataaaagaatcaaaataattccttacgtcacgtcagatcacagaggaggaaaatgagaaatcaacagtatgagaaactacagaaaatacagaaatacattatactcttttgtatgtgtgtggtatatatgtgtgcatatgttcaagtgtatgtgtgtgtacacttgcatgtggatgtgtaagtccattcatgtggaggctagaggtcaaagtatgtgtgccaggggctctttcttagtctcttgctcagtttttaagacaagtctcttactaaacctgtggcttgttgatttggctagattggacgggccagcacattcccagcatttccctttctctgcctctgcaaagcttcagttacaggcatgtgctgcccctttagccatattatttagtgctgtggatatgaacacaggttctcttgcctcttagactttattgacagcctctaaaaaggatacttttgaataacaagttggacagtgagggagtcagagaggaagcttaaaaatggctggaatcacaagtaaaaacacaccctaagagaatctttggaatagaaaaagcagttctagaaggaaagtttgtagctctgagtggttatattaaaaactcagaaagagctgggcatggtggcgcacggctttaatcccagcactcgggaggcagaggcaggcagatttctgagttcgaggccggcctggtctacaaagtgagttccaggacagccagggctatacagagaaaccctgtctcgaaaaaaccaaaaaaaccaaaaaaccaaaaaataaaaaaacaaaaacccaaagctcagaaagatttctccacagtgagtcacaactggctaaggtatagagatgaagaacctgcagaattctcagcccaaagggaacataattactgtaacccccacccctcaaggcttagggatgaacacagaagagtctgtggtggtggatgccgaccacacgaagcattatcatctgaacactgcagaggcgctacacataggaactcagttctttttcggcggagtatacaggtatatatactgtatatagccagaccaaatcccagcagggagaagggagttgggcacaatcctagccaaactctggagtgattgacaattgttagctgcgagtatagtgtaacctctccttaggtgagtactctccagtagaagacaacacatcaaaaggctttgcaaggctaaaaagacaatgggtacaaagttacatggataaagaagtggtgttgaacccttctcaatagtcacaaataatataaaatatcttggcatgactctaactaaggaagtgaaagatctgtgtgataagaacttcaagtctctgaagaaagaaattaaagatctcagaagatggaaagaactcccatgctcatggattggcaggatcaacattgtaaaaatggctatcttgccaaaagcaatctacaaattcaatgcaatccccatcaaaattccaactcaattcttcaacgaattagaaagagcaatctgcaagttcatctggaataacaaaaaacctaggatagcaaaaactcttcttaaggataaaagaacctctggtggaatcaccatgcctgacctaaagctttattacagcgaaattgtgataaaaaccgcatggtactggtatagtgacagacaagtagaccaatggaacagaattgaagacccagaaatgaacccacacacctatggtcacttgatcttcgacaagggagctaaaaccatctagtggaagaaagacagcattttcaacaaatggtgctggcacaatgggtggtaattatgtagaagaatgcgaattgatccattcctatttccttgtatgaaggtcaaatctaagtggatcaaggaactccacataaaaccagagacactgaaacttatagaggagaaagtggggaaaagcctcgaagatatgggcacaggagaaaaattcttgaatagaccagcaatggcttgtgctgtaagatcgagaattgacaaatgggacctcatgaaactgcaaagcttctgcaaggcaaaagacaccgtcaataagataaaaaggccaccaacagattgggaaatgatctttatctatcccaaattggataggggactaatatccaatatatataaagaactcaagaaggtggactccagaaaatcaaataaccccattaaaaatggggctcagagctaaacaaagaattctcacctgaggaataccaaatggctgagaaacacctgaaaaaatgttcagcatccttaatcatcagagaaatgcaaatcaaaacaaccctgagattccacttcacaccagtcagaatggctaagatcaaaaattcaggtgacagcagatgctggcgaggatgtggagaaagaggaacactccttcattgttggtgggattgcaagcttgtacaaccactctggaaatcagtctggcgattcctcagaaaattggacatagtactaccggaggatcccacaatacctctcctgggcatatatccagaagatgtcccaactggtaagaaggacacatgctccactatgttcatagcagccttatttataatagccagaagctggaaagaacccagatgcccctcaacagaggaatggatacagaaaatgtggtacatttacacaatggagtactactcagctattaaaaagaatgaattcataaaattcctaggcaaatggttggacctggagggcatcatcctgagtgaggtaacacaatcacaaaagaactcaaatgatatgtactcactgataagtggatattagcccagaaacttagtatacccgagatgtaagagacaatttgtaaaacacatgaaactgaagaagaacgaagaccaaagtgtggacactttgccccttcttagaattggaaacaatcacccatggaaggagttacagagacaaagtttggagctgagacaaaaggatggaccatctagagactgcatcatagagatgccagggatccatcccataattagcctccaaacgctgacaccattgcatacactagcaagagtttgctgaaaggatcctgatatagctgtctcttgtgagactaggccggggcctagcaaacacataagtggatgctcacagtcagctattggatggatcatagggcccccagtggaggaactagagaaagtatccaaggagctaaagagatctgcaaccctgtaggtgcaacaacattatgaactaaccagtaccccggagctcttgactctagctgcatatgaattaaaagatggcttagtaggccatcactggaaagagaggcccattggacattcaaactttatatgccccagtacaggggaacgccagggccaaaaagtgggaatgggtgggtaggggagtgagggggagggtatgggggatttttgggatagcattggaaatgtaattgaggaaaatacgtaataaaaataatgtaaaaaaaaaagaaatggtgttgacttacaaagagccaagagaggagtcaaatatggtcaaaccacattattttgcagttctcaaagaagtaataaaaaaaatcgaacacatttcctaatattgtacatcaagcacttacaaaagtaagaacaaatcatatgccctaacaagaaacaataataatcagtgtgaaaattagagagaagcttaaaagcaatacataaaattaataaaacactgggataatcctttttaaaattaaaattgacaaagataaagaaagagaagattcagattagcaaaattataaatgaaaaagggaaggccatttcagtttctaacacaatttaaagaagcattagagaatattttaaaaagctgtactctgaaacctggcttctaattttagcagaaacctcacatagggtctccaaagccaactctgagcctggttggtaaagctttctgtccttgctagtcagtttcttatcattaagcaatctgggattcaaagactttagcagtgaatatttccacttcagtggttgtcttagtcactgttctattgctgtgaagagacaccatgatcaaggcaactcttataaaaggaagcttttaattgggggcttgcttacagtttcagagtcccttatcatcatggcagggagcctagcagcaggcagacaggcaaggcactgaagtggtagctgagagctacatcctgatttacaagctggagtcagagggagaaaagaaagaggggaagggagcaagggagggagagagagagacagagagagacagagagacagagagagacagatatatatatatatatatatatatatatatatatatatatatatatatatagagagagagagagagagagagagagagagaaagagagagacagacagacagacagacagacagagaatgagagttttgaaacctcaaatctcagccccagatcacaaatcctacaacaaggccacacctcctaatccttcccagtagtctaccaactggaaaccaagcttacgaacctctgggaccattctcattccaatccccacaaagggcttccaccttgttaattttactatcaacgaaattgacttttgactttgacaattgattttgtatacaaagaaactctagaaaagaaagaaaacgttaagtcataccactaaggatcaggaggcagccctggacagccgccacagcagaaaggctggcccttctatgtttctgtgaatcatagcatatgcgcttgtaagaagtgaaggatatttctccattcaattttatacatgacaaaaaatattcctaccaaatgtgaagtggcaagtatgaatttagtgtttagttctccttaaacagtcaccagaccttgaggtcttcctcaggttaccacagcttgtagcattcattaagcagaatggaggaattttattataaaatgtaactaatgtattatatgttattatcattacaaacccttgtatgtaacccagagagggaatacacactatggatctgctccaactttttaataagtaaattttagttaaagtctatttaaagcaaactcctaagacattaaccagctcccaagagctgactactacatgttatgttagcttgtccatggtgctatttgttactcttacaggatttctctgtgtagccctggctgtcctggaactcactctgtagaccaggctggcctcgaactcagaaattcgcctgcctctgcttcctaagtgctgggattaaaggcgtgcatcaccacgcccagctactatttgttattcttaaatagctaaccacagcataaaattttattttcctaaaatttacatttaaaagccatccaacttaccaaagtgatttcaaaccacaattacattttatctcaactaccagcattttatttagccaggatctacatgagacacatatcatgatgtgctatgtacatcttgttatacagtgttatattgataacaaatgtcatcaatataacattgaattaatcttccataatttatggggaaaaaaggagcagccttactgaagggcaaagttatacaacagctttacagaagctgcatgcgagtgcagtaccgggacacgggcacggacggcggcactataaccattttccgtggtggtaatcttgctttcatctgacacagaaaagagaccgccgttttgaaaactcacagaactagcctcacggttttgtgagtccattgagcgctggctgcgaagaacggtgtttaactcgagaaatcattgaacaagttttagaaaataaagatgcttatgacaatttcaaacttgaaggtctccaaagaaggactgagatattggtgagaggagtaaagagaatcctggtgcatttatttcatgcttccttctgttcgaagatcattttgaggtttataaaaggtggggtgatccaaaaatctccaggctgagagtcctggctgaggctgtgaactgggctgcagagaaagggccacgcctccctcctctgctcgcattactcagcagcttttctgcatgtggctggctgcagacaatctaaacccttccgctgtcgctccccccttatactgttctgccaaaaggaaggcagagaggaaatcagctacggggcaaagactgaatagtgaacacatacagcaatgtccagcgagttacctcctgtgtcttatttatttatttatttatttatttatttatttatttattttctctaccgattcgctaaaatcataaagagaatgcttctgtctgacatcttggaccaaaatgcttcccatactgcactctgtaacttttcaattgaatattaataactaaatggatttataatccattatttccctttggtcacctactcatcacggactaaacgaaagggcaatgccattatcttcctggcccaactcttaacatacgtgtcattgccaaatcaaaggaaaccttaccactgagcaattcacagaacttcgcttagctaatatgcttaaggaatctgagaatgtcctactaaattttaattgaatgaagaccttttagaagaatttcttctgtagataaataaacctagagctaagaaaggaaagctacatctacaggctccatctcaaagctatctatatctgtagtcagttttcagggttcctacatagagaataagtatgtgttgaaaaaatactacactagtaagcagcctttacatcagtggttctcaccctgtaggtggaaatccttttgggattagaatgacagttttacagaggtcacctaagactatgaaaaacatagatacttacactatgattcataatagtagcaaaattacaattattaagtagcaatagaaagaattttagagttgggagtcatcgccacatgaggaactgtgctaaggggttgcagcatttggcaggctgagaaccactgctttatactaccaaaattttggaagaaagggagtgagttcattcatggccaagtacaattgctaaagatggagccaagattaaactgatctaagcaagagaaggaagtatttctgtcttggagtcttagcttctcagtcatggacattccttgatggtatctttccacttagaatatttagggttctgaaccctatttctgaatgcgatttcttgacttttcttggcttcaattccatcacttctgaagtctataaatactagagccctatatagccctctactcctttaaaatactgtcctcaatggtcgcttgcacacagaaaactctacataggccacgtgactcttagcttagttagctgagaaaatcaggaactctttctgagcaacactaaattgggctgagaatgagtcagaaaagtcaaggaaacatgaactcaaagtcatctagagttgaattctgggaagtgaagcttagagcaagcaaaggaccataacaacaaaagagaggcctaaataaatagatagataggtagataggtagatagatagatagatagatagatagatagatagatagatagatagatagatagatagatagatagataaagcaaagcaattgtcgagtcaccaggataaagaataggttcatctgcttatgtggccaaattctcaggggcacttctgcctctgccttagtcgtatttcggctcttggctctctgattgtatgcccactattaatgcaccaattacttatattaagttgaaataagctcttaatataagtcttctgtggcccaaacataatgtgaaaatcattttcatgtcacactttaattactcataattctatctttgtttctttttatttgtgagacacagtcttgctctgtaacctaacggcctgtaatccactttatagtctaacctggtcttttatcaccctgcctcattttcctggtgctgggattacaggcatgagtcacaaagctgggtagattcttcaggggtttttttttttttctttgtattttttaatttattttctggcaatctcactcgtgtccattatgtgtgttgatcattttttatcatcctgttcgcccacacccaatgaacttcttattcctaatacattctttcctagtttcatgtctctttgttggaaggtcacagactgagtgtaattaaagctgtttccatgaacacggcattttgtggaggatggttactggagcatggacaactgacaagtggcttcagcattgaatgaaatacctgctttaccacagtggcacttaagtgcatgctgatggcccccttgggtgagggtggacctcctaccatatgtcattaaatatcatgggctccatcttgtgtaactaaccatagccattgtgacttggctatagcagagtcatatccaggaaacaaggttttcagaactccttttatgttatttctttcctaggagtcgttgctcatagaggccccagtggcaggcccataaaacagtaggagctatagccatcgcctttgcttgctcattagaagtggatgataggaccctgttgctgaagagattgcagtcttcggttacagaaaatagagaaatcgaggcgggactgacctagaagcttcctcccttttgcttagcatttatagtcccagaaagtgcttttgtaagctgctagtgaagaaagtgatcaatggcctaaatcacttgtgaccaacctaccaggacaatgtacctactggtgcaataatcacagggctgattattatgagggtaaccaactggtctttgattgtatctgaagcctgcttcacaagatggattcatgcctatcactgttaagactggtcctaagcctatggccagggaattcataggtactaatgagggagttagaactgttgctttgctaaatgccatgctgtcaaattacttcccaaatacgtttgtttatgcccatagatagtgctgctctcaacctcggctagagaatcttcatcttgtaatgggcaaaggttaatatggtcactcataaataaccatttcttttagagtaaatgactttgagtgctcacccctaaatgaatcatctctaccactttctgagtggctcatggaacatggtagaaggatttctatgtttttactatagagaataataaaaaagttcaacaaaatgaaatattataaatacttgagtgatttgccctatggtataataatttttcaatacttgttttaagtctggaaagtgctcttctactgatttaaattactgttttaagtactgaaactaaataatggcacatacatatggatgacatgtggaaacaatttgcatactgagtaaaaatattaataaaataacataaagtggaaaatcactcatcttttaaaactggggatattgctaaatatagattgtgtgtttaggaagcccagagctgtgggcctgatccttagagccacattataaataaagttaaagtaaaaaaacaaaacctagacattcagtagggagatgttttaaaaccttggtgaccttgtaggtatctttcaaaaattgtatcatcccaattattcatattaagaatattttttaaagtgccacaggtaaaaaatcttttcttaaaaaaagcctttaacataatctctagaatttggatcaacaacattgctgagatattaaagtttcatggtacaaattatgacagaaaagtttgaccaaaaataaagcagccattgttgctacagtttaagtgtaagaatacaatagaatgggtcttggagagtgactgaattttacagttttataatcttttctaatgaagtacacaccttgtaatcattcaataatttgaacagttcataatattgtttaaccaatttagactgcaaagacctcggtctgacagagcaagtcttgacctgcttaacattatgttatgctagtcattttaaaatgagtctttatttcccatagaaggtcagtttttttacattattatataatcttttgacagaataacaaataacattctgaatgtctcatttctaaatacaaaacatcttagtataaaattatgcattgttttaaatgcttggaagtaggtccacatgtagaaaacaaagtacgtatgataaaaaatatcaaaattgtatattcagcaggcatattattagaaattgtaccacccggtgatttattagttactaggaaaactgtagagctaaaccaaaaagtaatcattaaataacaatcaatgagtcaaccaattgttaaagaaccaaatctataggcacatatatattacaaggcatggggtaaacagagatttgcagtgtgctctccttcagttatgaactgtactgcataggctgagggatcaatctatggcatgccatgcctcttcactttccccatcagctgtaaggaagcacaaaggcgaatccgggccagcaaagaataatgcttgagcatttgacatttcaccacttcctgtagcttgcatgcgttttattacactctttgacacaatatttgattttacaagttggatcaagttgtttagtcagcaaaacaggaataagcaaatgagattctacctgcctacaatttccgttcatctccagccgtctgtctgtccaccggaatgaaaactggagcatactcacatcacaaggggcacatgcatcagcgtgaatgaagctaccatacctccctttggtttcctcatctccaaaatggaatctccttttcagtattttatctttactgatttatcataagagctgtatgattcttaccttttttgtttacttagcagagacatcagaatagtagaaggaagatgaacaatgagataatgctgattttgtatacaaagtacaactcttagtaaaaaatgttgttgctttcagtggtataacaatgttattaaagtttttaatccatgtctggcttttttgttgttgtttacttttatctgtctggggagtcttgctatgtgacagacttgtttagatctgactatgtgtccagtctggcactgaactgaacagtgattcccttggtcctcttacctcgaaccctaagtagtcagagtttacatttgaggcaccataccaggatttgcgtttgacttcatacacataactttaacattttaagatggggaaatgcaacaaaatatgttcttttcataagaagagagtttatagctctcctattcctgtcattaaatggaaataatgttttgttgatgatttattaagcaaacacgattgatggttccttcaagtttgtgactggcgtctcaactgtgttattatttgtagtagttcttgaattaaagtgtatcagtctacggatgacattccaatcttccctacctcgatggaccagtttataaatttgaaggctgatctgtttcatgttcctacttttccctgaaagtattcatacctttttacgacataccacttacgcatttgcttttcatttcaacattctgactaatggtacttattaaacagctacagtctggttcaattcctgaagatgttagtacatcgcccctggatctcatagagttgttactaaccaagtagaacctcacagatacgcctgggacagtcctaacacagagaccaatagttatagaaaatcaaactcaggtttgtcacgagggctctaagaatctttattgtaccctccagctttggttcattgctaatacatgctttataggcaaccataactccctaaagaaacatacatagagtggtatccaataaaattaaagtttttcaaagaggtcctttcctcaccaaagcctgtggacagccagtgtgcatggctaccatcagtcgccactgatgattccccttgtctcatggagcattctcccctggtttctgatgaaaaagttgcgaatgggtgagagaccatgcctcttaaaagcataggtagatatatgatagctgatcaatagataagtagatgatatattgatagacaacagccttcctaaagtgtggctaagcactatttattacttctgtcttggtccacatgtttatttactttatctcacaaggaaatgaaattgatccgacaccacctccactcacaagttatcctggcttttactctgtgctgttctggatgactgtcaatgtaaatacatgaggtttgtgttgattttgttttgtttttgtttttttttttctttagaagaaattttaagatattggatgaagatgaaagtcgtaaggctatttaacctcttttctcaaggagaatattccaaattttccttttcctagagttagatattaacttttaaaaattccattaaccatttagatataaatctcaacatcttacattcattttatatatttttaaaaatcggcaaatgaatgacaattacattttgcttgtattttaaaattcttctgtctacttttggcctagaagaaaatgccagcttttagaaatcttttgtatcacatccattaatccctgttaacttgctccctctaaatactagtgtttgtaaaccttttcaggtatctccagatagctggtctaaacaggaatcgtttaaaacctttcatatgtaagattatcatattatcctcaattggaaatacagactgtaaaaactatttaagatatacaaagcccttacattcagttcttgattttaagtagtcttttagagtaccagtagattagaaaatacttattgctaatgaagtgctctgtagaaatatttgtgttcaattcacattatttacattgcttttctctcaactgttttttattataatttatgatgtgaatgatagtgtattcacatgtacatatatgtttattaggggtagggtagagttaccatcaaggtagagaataacatcttttcagttagtgatttagtacttgtaaaacttcgtattcaataaaactgcattaatcactatcattattagtctataagcttatttatatattttactcttgaaaccatttactagcaaactacttttccattatacattttaagaagttgacattttagcagtgctatcatttttttactcataaaataaaaagcaggatgtaataatgtcaaaaattggaatgactgtatgcctaaatgtcactcagcatggataaccattaaattgacacacccatctacctaagaaagtattgaggtgattaaaccaataacatgaaaatattgacactttaaatgtagaacatacggaaaaatgatgttactgagtcaatgcatatttataatgaaggatttcacttaagactgaagagttgcattacactctgcaatatatttgttgatttaaagataaattattaagattaaatataacaatttatgtaattccaaatattttatcattcatagtaaaagatactttttagtatccagaagccattgaattgtagagacatgttttgtttgttaagtccgagcaaaattatttgataacgtaccattttaaatatatattgtgcccatagaaattaggcactgagaaagtaatactcaacgaatgaaatttcagtgatttttttttttagagctatctattttgtaggccatgcagggcttgtatacatggcctggtttaataatattaaaaaaatgaagcagtttgaagaactgcttaccatgttgggttgggatacgtaagagtctatgtgagtgtgtgagtgagcgtatgtgtgtgtgtgtgtatgtatgtgaaacacacaacttctgctttgaagaaagacacggtctattaggagagacacactggacattatttgcgatggttgattttaatgtcaacttgccacaaattcacatcctctgagtgggaagcaccaactgaagaatggtcctggtcaccttaattgatgtggggaaacccaccccgggtgtgggtagcagattctggtagccatctagataaagagagacttagtggaaggaagcttattcacagcttgctgacctttcctcttgctgttgagtttactgaccatctggtttctgcagctgactcctttattgatgatcaggaccagtggtacccaaatacctagcttccaccatcgactaaggtctaggtaccttccagataccttccatgttttggccactatatggagactgctgaggcacccagccttgtggatggagcaactactgcattgccagccttcccagtgtgagacagccactgtggaagtaatgtgattgctaaagtagccttaagaaccaagcaataacaggttctgaggctctctggtgtgagctagttgttatttctattttaatataaactgtataaactgagtaaattatacacacacacacacacacacacacacaggcttttgaaacacagaaatacagatgaggatgtgattaatgattaattcctccaggacactgggagaggaaaatgttgctaagaagcttcctcggtaggcttgaactcaagggcaagacagtatactaggaagcaaaggaaagggctgtgggtataggaggcatgtaaaattaatataatgttttgatatttaggagaaaattgcaaaacaaaatgatgacagtgtttgaaagtgtttgatcagtgccaagcatcactttatgtacttggcaaacatgacttgaggccttaagctgtgatttgcaaatgtagattggaatcaagatctttatagatgaggaagcaaaaatcagaagacaaaataacattatcaacttgatctcatgtgcagccagggctgaactgcaaatgctgatttgccccagtctgggctcctcaaatcgttccttggaatcctattagttggaactttatctctgctcgtggcagggtgcctgggaccatgtttataaatatctgctgaatgaagaataagtgagtcaatcgaaccagaactcactttggttagttaatttcattcgtggtatttatggagagcagaagaaagaattccagagacacgatttgtcaaaactctctaaagaaaatgatgacactatatattgatgaaaatgaatgttcttgttcttgctttatttgattttcttgtccccccactccccatctgctagggtctcattacagcatagttcttgaatatcccaggttgacctgaagttacaatatattcttgatttagatggcagacattgggaatattttgactcttaaaatttaatagctaatctttgaagaaaattaaaatagtgatctccattttgtagacaagaaagacaaggaagagagaattttacaaagagatagcgaacaccatataacgtcatagcataatctagtttgggaagaacggagggccctgaagcaccatggtgtttgccagtaatcactgtattggatgtgtcatgctgaaatgcaatacaattaggctggcataaaagctaacttcacatgaagaaatagagactttgagaaatctcttctgaagaagcttgtctatgtgtagaaggatgagacgttattgagcccagtgggaggctttatcaggaaggggtagatgtcttatatactggagaaaaaaaatgctgtaaaactaatcaaaatcctggaatagagagtggacatgaagactggggtacagggagcccatgaggaagaaggagctgcttcaaaactcaaagacatggtgttctaccttcctacaacgtgtcttcatctgtaaatcagggtttaaatttgataaggcagaaaacagtcacaagactatggtctgcgtccatccaatcagctttaaggttcaattcagccctatatcttttctatatctgatcatttcccttcaaggtattcccacttaaaagcagagtagggtacatattatcaatggatttatgattcttggtcaacagttcaacagaggtttctttctttatctctttgttcttttgtttttttctttgtttctttctgtctttgtctgtctgtcttctcttcctccttccctcttttccttccttccttccttccttccttccttccttccttccttccttccttccttccttccttccccccttcccttcccccttcccttccccttcccttcccccttcccttcccccttcccttcccccttcccttcccccttcccttcccccttcccttcccttcccccttcccccttcctccttcccttcccttcccttcccttcccttcccttcccttcccttcccttcccttcccttcccttcccttcccttccctccctccttccttccttctttctttctcattaaggtttgaaataaattggccacttagtcttgcctctgtagataaggaagcacagtgctgcttgtgtgcaggtaaacaataacaccagcaccctgaaaaagtatttcccaaggaataaaaacaactccaaagactttatctgtgggagagtaattctgatagaaaattagataatttctcagcttatgtgtgatgttttaaaagacctcaagttaagtcctaagagaaacagtttttatcttatgcccaactcacatggaaatgcccttagcaatggtatttatagtatccaaaatgtacaattcacaaatgtatcatcaatagatggtgacggttaaacaagatgacacttagactagagaatgagtggaaaataatgtatgtgacacaagttggataaatctcaaaaacattttaggtagaataatggattatacaataggacataatgaatagttctgttatgaaatgtctagagacagcaaatgttcaggggcagaaggtaaaaatccagattgccttggattgaatggaagtcgatatttggtatttttgatacttgatgtacatgttttaaaatgattgcaatgatgtttttacaactctaattgtatttaaaagcactgaactacaaaaagataataaaatgattcttacatatcttcaaaatttcattcatttctctttttatgaatttaattatattattactggtgtgtgtgtatatgtgtgtgtgtgtgtgttacacatatgtgtgaactatggtgcactcatgccatgatgtatgtttgtaaaaggcagaggacaactttcagagatggcctctcagatccttgcagtataggttccattgacttcactcaaggtgttaggattgcatagcagtggttgctcagccatccttctggtattctttcttgttttagaattgtaatgtcttaattatttttctactcagttacattagttaacagcaaataagagaatgaatgatgaggaaattatttattactatgccaaacttcctgtttcacttggagccccaatattatgaatactattacagtggcctaaagagtgttattggttcagtgtcttaactgatttgttaaaatgactactttaaatgtgaatcatagatataatgctaaatataattttagaagaggcctctataatatgacatataagacagtcaactgttcttttgactaggagtcctcaacttcaaatcgcacaagctaagaaagtgcagaagatgaggattccagtgagctgacggggtggttcaatactttttccaaggatttacactctgtggttccatcagcaccaatgttagctgaccaggatggctgcggctcaagagtgtgacatctagagaggctgcagcagtaataaggaagacctttatttccccttgtggcgtttgcccaggtgagaagtgttcttccagaagcctgactgcagattgccctcatatttcattaatgaggtcaggagcccaacacttattcaatccctggcaagagcaatgaactcgcaaacaagccctcccctggaatttttatgaaattaaccaatttcctaggtcttctggatatataacccagaggggagagccatacagaattacagtcctactttagacagatgctatctattctattactaatgtaggaaagaaaggcaaggtcacttaaatgtccctgaactcaccactaatcaaggtcatacagatgaacttgaacatagcattattttttaaaagccatgaaatttaagattatctctaacttagagttacatattataattatatttaataaaatatatatcattgacggtggatataaaggactaccgtttcatttaaactaataattatagtaatttttaatattacagagttgccagctctaaatgggatgtgtccttggagctcagagaaccctttggaagaggaggtagaaagggtgtaagagtcaggaatggagatcagcaggagaacacagctctgtgaatcaactcagcaaagctcatacaaactcatagagactgaagcagcaagcacagggtgtgcatgggtgtataccaggtcctctgtgtgtatatatatgtgtgtgtgtgtattatatatatgtgtatatatgatatatatgtgtgtgtaatatatactatatatacacatatatatcacagctttcagtttagtatttctatgggactcctgcgtgtgaatgagtggacctctgattcttaaacctactcttgtggctttttatcttctgtttgtttgccttgtccagttttgacgtgatgatttttatttcatcatattgtatgttttattttgttatgccttagaagcctgttcttttctaatgacaggcagaaacggaatggatccagattgaagtggagaggaactgggatgcggaaagaaagaatctgtttataataaaagagaaaatactacgttagtctgctttaatatacaatgtggttcttagatcgcaagaaaaatattaatggcacttttgccttaggggagagcaaactttcaacaatacatatttgaagaataaataacaatttgggaaacgctttactatccctcttctgaatctaatattatgcaatatgttatgaaagagaaattctaatggatattttaaatcccttaaaaatgttcagctgaagagtccagtgttagttgctgctagaaaaaaagttaaaaacatgagaaatcaattagacactgtaattctacaggttattactgatgatgtaaaaatcattttgtctctcttcttgaaagttgaaaaggtgaagtagtttaatgaactataacatatgttttggataaatggtggcagagtgaaagaaagtgtcaggcaagtcctatgtgtgcttttcagccaaggagaaccaagcacaagagaggggtggagaatggtcttaaccccagtctacgcccaagcccttctcgttttatcttgtagatgctaaaaagatgttgttggagttccgttgtctcagcaaaagcacagatttggagttgtatttcatatttctttaaaaaatatttatgaatgtagtgttctgcctgaatgtatacctgcaggccagaaggcacatcagatctcattatagacagttgtgagccaccatgtggttgctgggaattgagggaattgaactcctgatctctggaagagcagtcactgcttttaatcaccaagccttctatccagcccatgtttgatatttttaaagtaattgacattttaaactttctctcaaaagtcatgatctgacaaattttccatgacgataggagtgattttataaatttaaaactattagtaaaaatgttttaacattatattattttttctgatggcactaaaaatatttgaatatatggcacatggcatatattgaaaacatcataaaatcctattacacaaaaggaataatgtagagtaaaatactaaatattaagcaatacccatgattaatatggagaataagaaattatgagatcatgaatattattttcttctttatgcatttacaaatgctctgtttttataatagcattataagtagtaaatttataactatgaaaataattgggttattaagagttggctccaagccaacatcaatggatgtctgaaaaatgtaaaagaagaaattaaaattttgagatagtgaattaagtcataagagctgcagattgtcacttgagaaaaatgtcagaataaattagaagaaagatatactgatgggagtgtatctgagtgatataatcagaatctgtgtgaaataatataaaattattatatgcttttcaggtatattttatataatggtatttataaaacatccttaaattatagatttagtaaatatgtaagaataatgtaaaacttcttattttggtttcatttaacttacttctgttgggcaattactgaacatacaaagttgaaacagacagtggtgacagtaccttgtcacacacaagatactaactacatcacactgcaaagaaggtatggagggaaagacaagcagacaccacacagtgcatacagttggtgctgtgatggaagtccacactgggcctaggcacatctcagaaggaaagtgactcctactgaggggaaggagaggtcatgatgtcacagagaatgaacaagtttcgaaggcttggaagcagcttcaataactcacagacacatttacttctacaggatagataggccacagggtaagaggtaaacctagacagctcatggaagccagtcatcttgcattggatttttaaaccctgacgccacatttaaataatggaagatttttgttgctgttgctgttgttgccattggtggtgtttgctttgagatagcatatcactttttagcccaggatggcctcaaaattcatagtgatcttcttgctgaaggtgttctagcaggctctggcatggcaaacagtacacacaggtttgcactttcacatcttttcttctccctttccccaaggtctattccctcatttggctactgattcattcctgagatgaaacaccgagggccaactataagaattaattatttggctaatatgtccagtcaggatttactaattcactccagcacatatttccccctttcccctttaaaagctcaatcatgaagaagcatccccttgcttcttttgccccttgctctctgatttcttttgctttcttacttgctgctatgttgccttagcagcagcttgaccatctcccttcccccgcagccccacattgcccccacctgctcctcctagttaataattcggtgtactgagaatttggtttaagagtgccgacctccctttcagtgatgctatgacttggatcaggactcgtttctaggacccccgatccagttctcctaatggccattcatttcatctcacagcagcttattggtgaggtttctcttactacccatcctaaaccttccccgaatcatcggatgattactgttgaatgtctagcatccctgctctgtcttgcgcaggtggggagaatgcatctccccacataccccagccttcagtggccaaggtggacttccttggatggtcttcaggcacatcccatttcattcagcttggtttggatggcagttgtctttttcacttttggttgctatccgtttctaaccatctgaaaattctatcgacaagctccagatttctcctcagtccactgtgccttccccttggtgatggagcttgggtgacgacccctcctcactgaggctcttatgagccaggagatatcttcagctctccactctggctcaaggccaccactagcaaaggaaactgactctctctgtactgactgaaaactccagcacacacctaaagttactgatgcatcccaccactcaaagaacggcccttctattccctataagaataaacaaaatgacaatatttacagagttggagtattccaggcatgtcccatcacactaggctcgacagcctaagtaaaatgtgcatgttagcgctgatgggaacatagaggtcagctgctcactgagaaacaggagaaaggagatgagttagatcaatagaaaatgcttacattcattccagtaaggaatgataaaagtttaaatgaacattcacaatttgctgacttacttcacaacacgtttactaaagcttagcaaagtgataatatgcacagatccttttattgtagcaggaaactttaaaactaatataatgcgataaatattttatccgtgtagcataaattaaagggactcaattgcctgcatcttaatctcgattagtgcctgttaatagcaaaacacacacaattaattgtactttaaaagcagatcagttatcaaactcagccttagaataaaaattttgatcttcaaatttgtttatgtagttaatatcattattgttagttttggtgccagggatataacccaggggtacacagtatgtgctaagcaatggcttagcccctagcatgtacatttttactatggttgaggaaccattaaagctttagcatcaatgaattaaatgcattgctattagaaattagagaaatcttaaagcattaaatatcaaaattgtgtgaacatcaatcataaacaaatgctaactaagttactttttaatggaaaatgaccatgtttctagagaaaaggacttacgtggcatgggtttttataattttataaattttcaaatatctaacctaatatctagattcttttacatttaacagattttaatttatatttagatggagaatatgaaaaacagttggtcttgcagaaaggtgtgtggaaacctgaaatagcgatttcatgtaagtataaatatttctccttcctggtaggccacattagataaataggtcagagtcatatccgcaaacccactgtactctgacctatgcaattcattggcttattgtgcacagttaggtgatttactatccacaaagatatatgtcataagcatggcccatttatagattgttagctgactgtgctatataaagtttaaatttttacagcctctcctcattagtctgtcaacatcactgctagtcacatctggaaatccttcatatttaaaatgctgctcaattcctggtggcagaaaagtgttccagtattctaatggtcatttttgtcacgggcaatacatatttacaattactttttactccttgacatggctcgatcacttctctcatttttgaaaatgacttaaaatgtaagctggaatggtctgcacctgtctacctgctacattttccaaggcgtgatagtgttcaatggaaatggaatcagtccagctggtaactcacacagctgtgcaggtgtgttttggggatgatattggggcaccaaacaaacaaaaaaacgaacaaacaagatgagccctggggctccagatgaaatagttttgcagcatcatcaaacagactcctttaagggaattggattttcattttatagattattatttttcctaggagcaaatggctgtgaaaaatttaacaattcttcataccactgccttactaaggattaacattgagaaatataaattgtttttgtaaatataaataaccatcaacagtgaaaggaaggaagagtgcttttatatgactataaagacagttgggatatgatggatgcctaaacgttttcaaggaaatgcaccaaagttatggggtaagataaaaaataactgcaaaagttatttttaagactgttctagtcttgatggggtggacacatttttgagagcatcaaagactaaacactgagttgataacatgactgaatgttttttgttttttgttttttgtttttgtttttgttttaaataaatgtcacaatatggcgacaagattaaaagtgaagagtatgcgagagtagagagtcaacaaagtcatagtgacaaaggagaggtggctaattggtgagcaggtaaggtttctctctggaggagaagctgctggagtttgtcactttgttactctacagtgttgcctggagttcgatacttcattactctatagtggggtgaagaagttcaccttcttattttcatttccttccctcaatgatttcttcagagctagctcttaccagctagaaattcttcaaacgacactcgtgccttccttcacacaggttgaactatttgtctctaatgccctaaagtactggtgttcaatcttccaggcacttccaatgatctgaaatctgacctgcttaggtcagctggctctgagattatggtattctagtcctcaaaccaacctgttggctcgttggttttgtaccaaacacactgacttacatagctcaaaataccactggccttttaaaaatggcatatcacattccaggggaggatcaaaactgctggctggtgatatttgtcaagtctctcaaagttgcactttccaggattttcaattcactgaattcttagacagacatgtttatgtgaaagaattctttatatattttttctcctctttgagtgggcaaatgaaaatcttgacctctgggttccttattttatttgactctctgtagtatttaaatcttaaaattttccttaaaataatctaagtatggatattaatccatgatattaacgatcgatccttgtttacagggtgcctttccctgctcctaccaggcgatttcatattttcaaggatcagttcttgaaagaggatgtagccctcgctctgccaatggctctggctcagcctcatgcatctgcctttgctatagtctcaccggaacattgacatagattgattttgccaatgtgatcagttgagttctacacagtttaaaaatgtcatgttctggcttagtgtttagtggtgttctttgttcatttatcgtttactatctttagtttttttagtgtatactcattttttcccctactaaaacccatagccaataatagacattccataagtacaagtaaatttcctgaaaattttctgaagtctgactggagacattaggttacaaaattacacaatttcaagtttcttatatcaaatctaatcttgtatcacatttctttccaaaatttccatttttacaattttgctaaaacagcaaattaatatattaaatatggactaatttaattaatattctaggtgataaaatattaaaatatttggctattttctcatttatctcctggtcactattttgattatgtaatgcttatccttataaattgatttgccaagttccatttgataaataatgtgttctaacatctatatttaattttttaatgttaaggattaagtttggggtctcacacatactggacaagtgctctaccattgaacctattttaacttttaaaacagtgtgttcttatttcaaaaatattttctgccattacaaactaaagaatttagaaacaaatcaataaaatgggaaaaactgcacaactaaattgttagtactaatgcttattgtgcaatgttttaaagttatgttatttccttatggtttttattttagatctacataatgaacattctctactttattaaaaggagaaaaataattctgactttaaacaaattataacaagaaaatagaaattataattgcatatagcagactctaccaattctaacactagttttattcattttttttttaggggaaacaaacatttgtatctttttgggatttgtgctattgtatcctcagcaactttgtacagaattaaatgttatttgatatgttacattcaatggccctgtaatatctttttgtttacatagattatgatttaacatagtatatgtaaactgttttaagtttcatcgggttgcaatgttttttcctacataggaatcttttggtagaagtgacagttgaaggtccagattattattaattaaaatgattggatggatagtccaaacttatcagccagacgctgatttgttagaactgtaattccaaatctgtaccacaaacagcaagagagaacagttagctggtttgttttaggagattacagcatcggaagtccaaccttgggccaactacttttactgcttgcttcattcctgccattttctggtgcaaatgttgggctctaggctgcaacattttcccaagacattgcactttgtttaaatgagcctgacccagtttctattgcttatagaaacactttggaattgatcgttttatttataaaattgtccataagctcctaagttttgcatccatcttggttcctcttgtaattaaaatgagtaaaagccttaatgcttagcacagatggtggctctaaatatgcattcacttctccacatcatgttatttatgctgcttctttaaatataatggtaattagctaattacaacattagcatatcaacatatgcccacactactccttattgtgggagaagggtatggatgacgaaaatccatccttaatacaattttaatcatgtcatcagcaacaaaaaaagactgaattgatattcagtcttccttgtgtattttagtcatcataagcaagccaaaggcaaccatcacaagatgaatcgtgttcacctctaggttcatttgcctaaagccaaacttccctactccatatctgtgtgtatttggaggcaaggcctttaaaatagttggatcacacggttagacacaatctaacttttctccatctaagtggaaatttaggcatcaaagcaagcactgtgaattcaggatcacagaagaaacaaacatgtcagagcacagagcatgaaaccagcaagccaagcagagaagcatcacaaggaaccatacctgtcaatatctcaaagcctgatctcatgcaaactatattcctatagtttaaaccacccagcattcagtgtagtgttacataggcccaaagcatctaaaataaaaccaactctatttgagaagtataattacaagtacaacagaacccctaatggcatttgagagacaaaggtgactaagcagcgtctaatgaagggcatgagcatcacttacatgtgtgcagcagaggacgtgcaatgcaggagggacccttctgggaaataactagccatctcctctcaggaagattaggttcattaaaatgctgtacctaattatcacttttgctttctgggagtatcataaacaaatgctttcccaaggagaaggaaaaatttatggtacacttgaacccaaaggttgcaatgggagaatatgggtcatttaaaaaaacccaacagatttaaatctatgtaaggttttccaagaaggtacttttttggtggcatttcctttaaaaggtgtcttgtatatctagtgtaaaataaatgatagtaatagcacaaatgaatcaccggccgtgttgctaagaaagttcaacttggatagagaatgcagtcttttcaagaaagagttctggactaagtagatgcttacaagtcaaagcaaggagcatgagccataagccgaattgcatacaagaaactgactcaaatgaaccagagacataaacaaaagagccagctacaaaaacatactgcaaacaaaacagaatcaatgtccagttttgcatagagttaggcctatatggtactaaagaaggacaggtgatattaaaaaaaaacaacaacaaaaaacagaaacaaacaaacaaacagaaagtccgtagatactgcattaaagctagaggcctgttatcatgggagtaccagaggagctgaacaagagttttttttattgctcataggagaaaacttgaaaccaggatctattgtaagttgaaatccacatctcttagaaaattctagggtctgatctgagaacaaggagaaaacaggtagttgtgaagtctaaaatgattcttatttacgttatactcccttataatgtggattctgagtaaacaaagcagtaatttcaagctgagctctggttttccaatagcacactcatttacttgcaaaacatgacttgattgaacaccactggccagctgttgtgtgccaactgcaggggcagataagctccggtctacatgtttcttcttgtatgtatagtctgtatcattctcaccaataacctcacccagaatctttcatcaaattgtgcatatgtgtgtgcacctgtgttgggtgcatgagtgtgtgtgtgtgcatgtgtgtgtgtgtgtatgtgcatgtggtatgcatgagtctgtatgtgtgtgcatgtgtgcacctgtgtgagtgcacaagtatgtgcacatgtatgggtatgtctgtatgtgcatgtgtatgtgtgtgcatgtgtgtgtgtgtgtgtgtgtgtgagtgtgtgtgtatatgtgtgtgtgcgttgtaacatttttctagccaacatcactgcattctaggaatgacagcatttttcctcagagacttaacaagttgttaaaaaaaaaaaagctccttgtaaatatgaacagattacttttctaaacctagaaacttgccaatataaaatacaaggcttaaatttattcaaccaatttccctcatgctttttaatagaaaccactttaagagtctgagtccagccaccaggaacccacagatgtggggatgggggtgtctgttagtcccagctctttcttacctctgcatagacccacccatacagagggtccttttctcacatcacctcaggtcccaggtcccaggacctctgtgcggtttctgttcccagtttttcaatcattgttcctttcttatacgcaagggtctccatccctctactcatttagatgtctcaactacaaggtcacatttctacctcctttttctcttcaagcccctctctcctatcatctctttatgcggtgttctttttctttaagggcctttgatagtcctttgtgcatttttttctaactttattactagactgaaggcaacatatgggcatgaatttccttgtaatttccatctttcaacaccttcggacaccaactagagggctttgtaaaaaaaaaaatttaacttggatgtcactttttgacatcttggcatgaaaggatagagaggagttatgctggcaagggctgatttccttttcggagtcagggctaaccagtggttctaccaccacacagacatgagtgttctagaatacagaagctatggcaaggctgcctgagttcaagtttgtgctctgccacttatctgtgtaacatttggcaaggcaatctagtctcatagccttcatttcttcccttgtcaaattatcaatattacatagttcttacattcctgaagtactgcttagcaaagtaagtactacctctctataataagttgacctctaggtacgtagataaaagagaagagttacaagcacaagtggagccactttgtagatcatctggatttttcagacacgtgtgcaccaagagtaagtctctttctacagcctaccctaagccagagaaacacaaacggagctgtaaattccgcttaattgacatttcagaatttcaaagggaagtaattgcgtccctgagcttctctgcactgatccagagtgggacacatctcagcccatggattgctgtggttctctttctttccctgcactctttctccccctcccactcttccaagtcagatcaggccttcttgctgaaggggaatggaaaggagtacctggcggatttcatcttcttcacctaacctggagggagaggacaacttggatagaacttggcatgcctggttttactgccgtggcccccgaggactacccagatctccgctgtccacagagaatggaaattaaattcaggctaactttcatcatcaggaacactcagataatgtgttctgatcatcatgtgcctgtgtgtgtgtcaattttgagcaactctccacgagagaaggcttctcagtggaatggagtcctgagtttctggtccttgggttgtgtccttctgtctgtccacttgctcctgatctttttggatgggaaggcagattgtttgctcttctccccagtgccttcttggatactgtataattaattaggcctccaatcatgccttcccagcctccacggatggagaaaccctctccgccatgccttaaagaggaattgctgtaataaatgagtctcctgatagcaaatttctcagcaagggggaatcgcgtaaatggagacatagtattgacagcaaagtccaatgtgttatttttaccagaacgaactctccggttcaagcctttgaaagagacatttgaaaaccaaaaacaaacaatgtaatggagcgaggaaaaaagccacagaagtgagtggcagggagtttaaaagagcagatgccactgccaggtctatgggacataaccagccacttgtgctgggtcttggcagtttataatgctacctcatcttctccgcgaaattgttttcccgtaaatctctgtggccatccattcctgtctacacattatgttcctaaaatagacaccatctaaaaatcacttcaaggagctttgtggaggaaggcctaaattgcaacactcctccagcgaagatagatgcagtgtttgatggcattaccagtcggtagccaggaaggggagtttgtgaggagtttttccaccacagttaatctgtttctggaaggaaagggaagtgtcagacttcccgaggaggcaaacgtgtgtggaagctctcatttgcatcacccccggcctgtcaggtattgcagcaaaagggagaggtgagctaccctggctctccttgggcaggagggacagaatcaggaagcatcaacctcagcatggaattttcctattcctgtttggcatcctcctcttgggatgatttacagcgcgggttggagaaacacgctctgccactccactagcgcaccagatagacagtgcagacctgcagatccatacccgaggagaagccacatttcctacgtgtgatagcaacagcgtttggcaatttgcgactttgctactgcagcttagaaaatatttagtcacatgcacatctgaacagaaagacacccaggcttgactcagtcatttccgtcagacacacgaaagaaaaagcgtctctgctcacaagcttatttggactgctttgttgaaaggaggggcggcagacactttgtagatgtggcaagagggctttatatccagacctcaaacaggtaggagagaaggaagccaggagaggtaaggaaggggcgtggaaaagcctcacagccacctcgaagaaaacagtttttttgccctgttcagaaagcaagaggttccacagtggttttgtgtcaatggagcacatctgcagtatcattgccgttggtgacctctgtctaattaaaagtaagtcagtccttcccacccggcattgtctgaaacccgggactctttatcactttgctaaagttcatttgcaagtgtagttaaggaagagtcaggggggaaacagcatctgtcccttctggtcctggggaggaggcactcctttccaagagtcaagcctctgcccaaagaagctgcctcccctgcaatgctaggatccaggagcagccccgctgccttcttgcttcctctgtgaggtctaatttttgcatcatctttaggagcgatatgacctctattcacagccatcgaatccagttccaaagcaccaatgacagagggggcttcaagacaagaccttgcctaggaggatgcaggcaagcaaaggcaagagctggcccgatgccaagttattttaggccaaagaatctcatccttctatcaaaatgctgaactgcaaaacgaacctgatttcagttcatggaaggttgagaggaggaggagggggaggggaggaggaggaagagaggaggaggggaggaggagggaggaggaggaggggaggaggagggggacagttggtccgaattcacatgcaaaaatagacttcctgttctgccccaactcttatttccgtgggctcttctccccaaggatttaccaggtaagaattcaccaccaaagaagatcacaatgagataatcagatggcttacctgataaaaaggaaaattatccatctgcagtgaggagcaacatctccccacgacgagtccgcaccttccgttgcaacgattcagattccttcttgcaaaaggtgaccaagtgcttcacaagggctgcagcctcataggggcagaacacacgtacacaaacacacgcacacacacacacacatgcaccagagacctctgcagtatcctctcggcttcatcctcgcctcactctatggtacctaatacaaatcagcaaatagcttgttttaaaaaaaaaagaaagaaaaaaaagcggagacagcacctaacgttacagtgccatctagtggctacatcgtaaataggttctcacagcctggatttctgtgttctttctcaaccgcttccttctggttcctttttcttttttcctctttattttggttttattacttcctcagatgcctttttttcattcccctttgctctgcctatcatggaactattgacttaaagattaaaacaatcagaactggagagcgttgcttttaagttaaaaaaaaaaaggtgctaattttgtttgtaaatgttactttattttctctattaaaaaaaaaaactcattgttacttttacagattacggaacccatgaatgaaatttgcttatttctactgtctggagaaaagtgagtagtcttttactacgtagtcgtgactttacatgaggaattttgtggattctttcttctctaacaccgtgttcacggtgcttttcatactatagtgagtggctctgaaggaggcagatgcgagtttaattttaaactcagtatcgatgagtgtgttttgaagattatatccccctatctttagtattgatgttaaataggattatttttatacccatttccatggtttcaccatcttttattgtaatatatctatttgtctcccagatatgactagccattgaattgtcacactatgttttagagaacaaacgtaagtattaaatattattggtgtccactaggtcttcccaaaacaatgaggagcccatactgaagtctggggagctacaggaactgaactttctaagccatatattataatttaaagcatcattagtctttcacatttggtcatacataaacttatttaccctgggtgtgtttctcttgtcacttagcacacttaatgctgatgaaagtcaccatacatgctttgctattaaaaaaaaaaaaaaaaccaatatcccttagactttaatttgtctattccatactacaggacagggaggcatatactgttaatattcctctagcaattctcattgtatgttgagaataatgagacattctgaaccttattgagacttttctagaccacatagtttgtgaagcaaaacaaaccaaccaaccaacaaataaataataagaataaggataaggcccaccctttcagaattcattattttttggaaaatagtaaatattttacctctttccattctagaatcctggagatgtaattttcattgtttctttataaagaaattttacaagtccttgtttatgggttcatgggtccatctcctgggcccctttcttagtttctgaaaggaagcaattgaccaaaattgagctggaagtatatagctcatttggtagaacacttagtagacatgcaccaaaaaaccaaaacaaaacaaaacaaaaaacaaaaaaacccaaaaccaaaaacaaacaaacacacacacacacacacacacacacacagattttcagccttgtagactgcttgtacaataaaaacttcagaacttggaatgctgaggtagactgatcacaaatatgagttcaaagttattatggggttagaaattccatgccaacctcagcctcagacatagtcacaggctcagcctcagcaactaccacagccatggtcacagtcagagccacagccacaaacacaaccacagtcacaggcacagcttcagacacagacacagagagagccacagtcagggcctcagccacagcattagccacaacctcagccacagccacagctacaggtagagcctcaggcacagacagacacaaacacacaaagacgcagccatagctgtcaaagtcacaatcacagtctcagcctcagacacagactcagccacagcttcagacacagacatagtcataaacacagagaaagtcacagtcatggacacagctacaaccacatcctcagcttcagccacagccatagctatagctacagcctcagacacagacacagacagacacagacagacacatacacagacacagccatagctgtggcctcagaaacagactcagacacagccacaaccactgccacagccattgtcacagccactgccacagccactgccacagccactgccacaaacactgctatagccacagccactgcaataggcactgccacagccactgctatagccacagccactgcaataggcactgccacagccatagccactgctacagccacagccactgctacagccacagccactgctacagccacagccactgctacagccactgccacagccactgctacagccactgccacagccactgccacaaccactgctatagccacagccactgcaataggcactgccacagccacagccactgctacagccacagccactaccacagccactgccatagctgcagccactgctatagccactgccacaaccactgccacagccactgctacagccactgccacagccacagccacagccactgccacagccactgctacagccacagccactgctacagccactgccatagccacagccactgctataggcactgccacagccacagccactgctacaggcactgccacagccacttccactgccacagccacagtcaaagtcacaaacacagacatggccacagtctgagcttcagtccgcactacataatgagaagctgtcttcttaaaaaattaagttaacttcctgttccatctccaaaatgcacaataatttgtagctcttcactgtctgaaaaaagtgttgctccttctctggttcaggctgagtaacactggaagaagctggagtgaccaacacttggtaactagttactagaaagtttgaaatgaaaaggcagaagggaacatttgaactaagaagtagttttatatttatattatgattctaagaccatatactccatatgaacagtacttaggatttaaatatatgcacataaaaataagaacatccaaaagacatactttactacttactaatagcatattccagaagtcaatgttgtgcattttttcttaataataatatcaacatctctccttccttattgccagagtgcacttggtcccttgtctatagaggaccaggagggcgtgggtggtgtgttcccagctgaaccagtctaaagaactatgacatgactgccatctatggaactaaccttctcttttctctcaccatagcattagaagcaggtagggcaggcaggatgcctacaggaaatgtcacagctaatgaagaatgagggaaccatccaaagccagtgcactccctgggttcctaatgatatcacaggtacaaggcagaatctcagaagatctggaacgtccctgatttgagtatacaagacagcccctaaaaagtctctggaccaatctcttttgatatccccgtgtactcaaaaccagttgatttatggagagaggagtttaagccctgaagatatcaaatattggttatatcatgggtgtccaactctgaatttactcacttcaaaagtacctgctaataaaggcattttcccaggcttaattaacaccattaagccaagcaaatgaactcttactttgagaagtttccatctcacaatgagagtcagtgagaaagggagagtattttcaatgcatgcacccctcttccttcggtttgcctgtttctttcatgacttctgcatcttaacaaacatccagccatctgcacaaggcaaagtggaccagtgtctaggtcaaacatctttttctctaatgctttccctgtgttttcagtgaataggctccttttgttaattgtaaaataaatttatgttttcttttatggaatatggtcacggattatattgaaaatgttaatcgtgagagaataaatgtttctttgcagactgtttctgaagaaggttaacattccattcactgtacaagagtgctttttaatgaataaaaaatattcattaaatatagcttgtcatttagtagcagacacgtgattcatcagagtggtaacaacaccaactgctttaatttttcttcatctaagacctgccatgaaggaaaagacaagatttttaaaaattagacccttaaaactatgtatttaaattttaaatgttcactttttaaacataaaaatgtaaactaaaaagaaccgtaaaactttatgctgctctcacccttgtgtttgctggcctctctggacttttgctaaaggtctcccatttctatctgtctaccttctaataatgaactgcagttgggctggcatattatatcccatataccttttgtggtatcttagttaatgaagaaaagtttttatttttcacttttccctggcttatttccatcaacaaagactgaaggggccatttccttatttctgggagaccccatgtgatctcatctcagaaaagagaagaatgttatttcttggctgtctctacttccctagatggtgggtgcaggaacttgacaggtaagctgtgggctgtgcctcttctgtaagcggttccaacaagagaagaaaatgagaacacaaaatgtcttgtcattgcttttgccactctgtctctgtcaggaggacacagccatctctttgccattactctgtggggcatgggctctgcacagacaggatggtctccagttgagctgaggtctgaaccccgtttgtgataattcacctaaatggcacggtaggcgttccctcatgctcctggaactctggctcctgcctaagttactgccccccacaacccccacaagagaagcatggtcagtagtcacgtaggcaatggcccaagcttctgaccttcaagctaaactcctcccctgttacctagcaatagtgaggaccataaaaagggctgtttagcccctgcttgctctcttacctcttacttctcactctcttacccctcactctcaccccctctctcctctctctttgtcttctcttctctttcctttctctttgccttctcctctcctctcctctcctctcctctcctctcctctcctctcctctcctctcctctcctctcctctcctctctccctcttactctctttctctctagccttctctctctctcccttctctctttctccctgcctttctataataaagctttaaaaccatagagagtctctgctcatcaagatccgcttcatgcactctcacaggtgttgggaacctcttccctcgtcccgctcttctataaccctggtggctttagcaaggtagctcctggatccccaggtagggctgccccttggccacccgctgaagagtgggtcagaggcttgaatgcccacccagggatgagtggaaagtgtatggcagctctcccatgcctgacagaccagagaataggtaaaactctggcggggtgtgagtcccccccttccctagggaccccctttttagttcccaacattactccatcacttgctggaaagcattagctgcttagtggccaaagaagggagattacaagagatgttacctctgttggtagaatgtgggtattaaagaataaatgtgggattcaagtggaaaagatagcctaggttctttctacctatcagttttaagataagcaagaggatctcttgtgattagcatcttgaatgattcaaatgttctcaagaccagaaggcattaaaattccacagtgaaattcgtaaaatctcctaacatggaaaaaatatcctttgttaatttcaattttagaatgttaattgtcatgcattgtgacaaccactgcttgaatatattttttgataatcattaaggaattgtggaactggaaagttttctcagaccatccagaagacgattattattttggataacagaaatgtgacatccagagagatagtatgtcttgttcaaggctatacagacagtttggaattgtaaaagttcattcaaactttcttccccgtttaactatgaagaaaatgaatattgagcaatgacatcggcacacaagaagtgaaatggaagtgaggggagggtttctggatataccacgattgattttccctaatgatttgactaatatgaatgaaataggaggatataatagaagctgtctgtttaaaaaggtgatggaccaggagggacttccagtggagggaggggaacaccaacctattcacaaaacctttggccccaaatttgtcctacctataatatgtgcagggataatatatggggcagagattcaggtacaagttaaccaatgacttccccaactttagaagacccccgcccccatgggagatctaaatcctgacactcttagtgatattctgctatgcttgcaaacaagacactagcataactgtccagcagccagtggaaacagatacagagtcccacagccaaacattaggcagaactctgggagacttggggaaggatcgaaagagtcagaggggtcaagaacaccacaagaagctctacagaggcaactaacttgagcccatggggctcacagagactaaaccaccaaccaaagagcatgcagaggctggatatggaccccttagacatttgtagcagatgtacagcttggtcttcatgtgggcctcttaaaaatttgactgggggttgtctctgcctctgttacctgcttttgatgccattcccctagctgggctgccttgtctggcctcaatgggagagaatacatttcgacctgctatgatttgatatgccaggtagattggtacccatgggggttctctgaggagaaggtgaggtggcactgagggagcagtatgtgagggcaggcctagcagtatgtgagggcaggcctagggagagaggaggtagaagggttacatcaggatgtaaagtaaattaaaagaaaaggtgaaaggctaaaccaatattgggttaagcactgatcaccctcatgtatagctttgcagacagttcttaaaaattgaccacaaacttctcaaactcaaggacatgagagtacaacactcatgactttcattcatgtccaaggagagacctggaagaaaattgtcccaaggttctaaaatttcattacaatctgaagtaaaatctgaaaacacattttatgtttccttagttaataaatcatagcctcgaaggaaaacaaagaaaccttttctttctttctttctttctttctttctttctttctttctttctttctttctttctttctttctagataaagtcatgatcttgtcttgtgtaccttcaaagacccagacctaaatggtccttctgtcttgcctttcaaatagtcaggactgatggcatgtaataagtaataagggctggaaagtaaagtagtatgctgctcatgcctacattgtatacctcactggcaaacagatcaaggactaggccttagccttggaggcaagatctaggcatattacagtatttcaattaatttgtctggatctactcttacagggggatgaagagagaatgaaactataacaagaaacaaagaaggtacatggaaagtcataaaggatttggtaactatgctggattctcttctgtgctcatacatactggcttttatgtcaggaagtcattgaaatatattgcctgggttcctccctcatccctttcactcaacaatcctcctcctttgcagaggtaagccaactaaaactgtgacaaaaatatcatcaattacttattggatttcaaagagcaattttccatttgactatattttgaagtcaatcacagcacttgcctatatatgcaagagatctagcacactttaagtttacagattatttttgatattaaaggaaattgctgatatttatgaagacaactcacttttataaaataaaactgaactttgccatgacttaggataagccaataatgtgtaggcaaatatgtaattcctattcccctgaaggcttattggtgacatctttttcttttcctgtttaaaaggaaaaaaatctactgaccttcctaggaacctctcacagtcctcacactgtgtgtgggtgtcattacagccaagtgccatcttatttcacatggcttagtgatcattgctgaagaagtggaggaaagagtgtgagagacagaggaacagcaagctttctgtgagactgggtctcctagaaatgccagagagattacacccatagagtctcatcaacatggctgcctaaataagacctgaacaatgacaacaccaatggccatactaacatgcaactggggaagataaggaggttcacactagaggaagaactatggacaatagggaaatgataagaactggagaaatggttttccctgaggaagaactccccaattgttatctgctataaagtggtcagccctggcataagatgcatacaggtaacactatatggactgaccaggtttacaatatcacagtgaatgctatgtgtttcatatatacaagctatctatctatctatctatctatctatctatctatctatctatctatctacaattaaataacaaagatgccatgaatttggatgaaagcaaagagggttacatgggaagagttggggagagagaaagggggtcatgttctaattgtaacttagaaaacaattttaattactataaaaagcattcataggtttagcataattcatagaaacaagctctctatgataaatgattctacttaacaccttgatacttggtaccatcctgtggtaagataggttctcagaaaaaaatgtattgatacttaaatatttatttctctttccaggtcaaaatttgatagtgatttcaaatatatggaaattattgctaaaacttagtataggctgagtatttgaacactcacaggaaattcatgacattgatatttttgccatcattttataggttagaataccaaaaaccaaaactatttatcatttttgccaaggagataaaatgtagcttggaaaatagcagcctatcttcaaagtcgggtccttgttttatagaaatctctttctagcaccacattattattatgctattgtcaagtctctgggatccaaggggaaaataggagatggtgcagctcttcttcactggtctgggaaagatcacaatgtgcttacatagacaccatggatgaaacatatttctaaatgtacccaaggaaagggggttttgaggtacaaggcaggctggcagccacagttccaacaaatgtggtattgggtatgtggccaagaaggaaagtagcaaatgacacctctttttacttgaccctaagtctcagatctcctactgcagggtggtggactgtaaggtatggttgagccaaaggcttgatgccctggagaccctgaagatttagtaggagcttcgcctgctctcagcaccaatcccctgtcatatagccatagccccctatagatttgtggttatcagtagctgaagggcaatgcccaagcccttccacatatagatgaagcatctctaacatctcggaccaagaggcatgactacagtcatgtaagctcaaaacagagttctctatgccaatgaggtacctagaggtcgagagggcattccaataagcttcctttcccatacatttctccctgcaaaaggtatatcatctcatgccaaccctgagaagtggggtatggttctacagatccattttccaccatgacaataataaactgtttgggaccatggaatgcctctttttttattgtgatcaacagtgggaagacatggagaaggccttcgcctacagagtcacagtctagtctctgaaagaaggcatctttgcattctcagccacgatcaccaccaagcctgccactatcaagccaaagacaatttctgcagggactagctggagctcctcccccatgtccaagatcctgagaacccacagttctggggagcaccgaaccagtacggagtcaaactcccccatccagtctccacaagtggccgtgctcagtggtgggacagacttgtgatgacacaaccctacatcctacaacatgtgaaaggatatgactgtttggaaattctcttgccaaatgaacacatcaactaaatttcagaggagcattcaggggagaagaatctctcagtctgtcagtaccttagtatccacaagtcgacatttgttgaacataaaaaaatgaaaagagcagaatttctgagtgtgagaggttgacaatgaggcttctgacaaagcttcatgtttcaaatataatattcaatgtcatgtttttctttttctcagcacattttttgaaaaggcaagtgctttctggctctgctggatatttgtgaagacacggatcacatgagaacataaaactttgtaagctttaaagccttgcttctcgtccgagtgtggcagtggaacaacagcatctccatctttgaggggcttgttaaaattttggaccatttcctttgtcccacaacctgccagatcagaaaggacgttttgacgagctgcccatgtgattccagtagacactgtttaaaagtgttgctgtagagtgccgctataacaggaacttgagaacttaacataactgatgttatgacgcaagtaccattccctaatgctcctgcaatcttttcatatcacctcaagttgtagggacagccaaccataaaattatttctgtttctacatcataactgtaatttttctaccgttatggattgtactataaatatctaatatgcaggatagtcttaggcaatcgctgtgcaagggtcatttgtccccaccaagggttcatgacccacagattgtgaactacccatttagaccctaaaagctcagcacatagacagtacacaacaaagacaaagatctgatccatcaaagttcatagttctagaaccatctctaaatgcaccacctttggatttttggcttctgtagttctgctttggctaactgttcttactaacacaattccggaggtggtttcactctgagaaaggttcaggattatacaggatcatgaatacccagtgttgtctctacccagctgataaagactttctattgtcttaaacccatgtccatgcactcttctctggtggacaacccacaacattagctaatactttcacacctctcataagagcttttatttttaattaaattttaattttgcatgcaaaataatgtttttattatgacattatatatatttatccatatatgcataaatatatacatatatgtcattacatatacatatatataatgtctatatatgtatataacaaatcattgttcttatttgtttaccccttactcctctacccttctccaacctcttctttttggtctcctttctcctcctaaataaacctcccttctgatttcatgacccatgtgacctaacgtttataaggctacctatttttctgtacccagagcatgtgactaaacaatttgtcccttctcatcattttctgggcactccacactccaatccagagaagctatctcctaatctactcttgaagtaacagtttgaaaattagatcaccatgctggctctttaagtaaaacctagccttcctatttactgcacaggtgcaggccataccagtcagaaaagggaagagccccaccagataactgaaccctcctgataactaggtttggagcccaaacacccaagccactgacaccaccaccctactgcctgctcccacttcttgcacttgcctctacgcaggtgactctccagagcacaggtgcaggccaggctaatgagaatgagtaagaggcccatctgcactcagaaacctcctatgcccttggtttggatccccaaggcacactctgtagacatcctttctgtgttttatcacccacagagctcagttaatatttttaacaaaaccatagaggaaaaatttcctaaccttaagaaggacatgtttctaaaggcagaaaaatctcttaagacacaaatggattgaattggaaaagaaagtccctggtcaactaataatcaaaacactgaacatgcagaacaaagaaaaatattaaaagctgcaagagaaaaaaggccaaataacatgaaaaggtagaattattagaattatatttaatttcttaacagagaccctaaaagccagaatagcctggacatatgtcttacaggctctgagagaccatagataccatcctagactcgtctaacaagcaaaacttaaaataaaaagatttatttttatatgagtataccactggtctcttcagattcaccagaagaaggcatcagatcacattacagatgtttgtgaggcaccatatggttgctgggaattgaacttaggatctcggtgctcttaatcactgagccatctctccagcccgccagcaaaactgttcatcctcatagatgggtaagacaagatactgcatgacaaagtcaaatttaaacaaaatctactcataaatccaggcatatcgaggtacaaatggaaatcaacaaccctaggaggttaactacacccatgaagaaataaataagctcatacaaaaattagagggaaacacacacacacacacacacacacacacacacactagcactaccataaacaacaacaaaataataagaattaacacttattaatcattagtatctctcaatatcagtggactcaattcctcaaaaggcacaggctaacagaatgaataccaaagcaggatttatccgtttgttacatataagaagcacacctcatcatcaaagctagatattacctaagagttgagggtttggaaaaagattttccaagcaaatgtacccaagaaacaagctgttgtatctgttgtaatataagacaaatcgacttcaaaacaaaaattaatcaagtagacagaggacacttcatatttaccacaggaaaaccccaccaagatgatgtctcaattctaaacatctatgcccctcaaagcaaggacacccacatttgtaaaaccacacatcaaaacacatgtattaagtcgggcgtggtggcgcacgcctttaatcccagcacttgggaggcagaggcaggcagatttctgagttcgaggccagcctggtctacaaagtgagttccaggacagccagggctatacaaagaaaccctgtgttgaagcccccccccaaatatgtatttacagtgggagacatcaggtcattcagacaaaaacttaacagagaaataatggagttaacagactaacagacttaacgtggacttaacagttatctacagaacatttcacccaaataaaaacaatatacattcttctcagaaccccatgaaacttctttttcaaaattgaccacagactctgttacaaagcaagtctctacagatccaagaaaactggaacaactcccccatctcatcagaccatcatagattaaagatgaattttatcaacaacagaaagaacaaaaagcttaaaaacttatgtaaactgaacaactctctactgaatgacccctgggtcaaacagaaataaaggaagatattaaagactttctagaactcaatgaaaatgaatgcacaacatacacaaacctatggcacacaatgaaagcagtgctaagcggaaagttcataacactaagaaccttcatatagaaattagagagatttaatactagcaacttaacagcacccctaaaagctctagaataaaataagcaaatacacccaagaggagtagatggcacgaaataaactcggggatgaaatcagtaaaatagacacaaagagagcaatacaaagaattaatgaaacaaagggttagttctttgagaaaatcaacaagacaaaatcaacaagacagacaagccattatccaaaccaactaaaaggcagagagagagagagagagagagagagagagagagagagagagagagaatatcttaacaaaatcagaaaagaaaaggggggcatgataacagatactgaggaaatacaaagaatcattaggtcgcacttcaaaaacttactccacaaaattagaaaacctaaaagaaatggacaactttctcaatagataccacttatcaagatcagataaacaattaaaatagacctatgacctataaggaaggaatcacaggaagcagtcatttgaaaaggctcccaactcccctacctcacaaaaaggaaaccctcaaacaagagctaatatcaataatccttaaattattccacaaaatagaaatagaaggaacatcaccaaattcatttcatgaggccacagtcaccatgatacccaatctgcaaaaagactcaacaaggaaagagaattacagaccaatttttgcccatgaacattggtataaaaatactcaagaaaatatctacaaactaaatccaatatacataaaagatgtgttcaacatgaccacataggacacatcacagagattcagggatggctctacatatgaaaatctgtcaatgtaattcaccatacaaacagtgaaaaaatacccgacgtgatcatctcattagatactacaaaagcctttaacaaaacacaacactccttcatgatacaagacttagagagatcaaggatataagggacatacctaaacatagcaaagacaatatacagtaggtggatagccaacatcatgttaagtagagagaaactcaatgcaattttacaaaaatcagggacaagacaagactgtccatagtacttgacattctagctagagtaataagacaaccaaaggagatcaagaggaatacaatttggaaaggactaagtcaatgtattattattttcagatgatatagtagcatatacaagcagcccataaaatttttccaggaaactcatacaggtgataaataccttcagcaaagcagctggatacaagattaactaaaataaataataaataaataaataaataattcagtatccttataaacatcaaatgggttgagaaaaaagaaatcaaggaagcaacacacttcatggtagataaagataatataaaatatattggggcaactgtaactaagaaactgaaaagcttatatgataaaagctttaggtctttgaagaaagaaattgaagatgtcagaagattaaaagttctcttatgctcatggacctgtgagattaacatagtaaaaaaaagcaatctacagactcaatgcaaaccccatcaaaattctaaaaaaatttctttacagacctggaaagaacaattctcaacttcaaatggaaaaccaaaaaaccaaggatagctaaaacaatcctgtacaaaaaaagaacttcctaaaactaccacacccctgattctaagctctttgacagagctatcatcataaaaacacatggtataggcataaatacagacaacttgatcagtgcaatcgaatcaaagacccagatgtaaatccgcacacctgtggacacctgattttttattaaagaagacataattatacaatggagaaataaagcatcatcaacaaatggtgctggtttaactggatgttggcaagtagaagactgcaaatagatccatgtatattaccctgcacaaaactcaaggccacatgaaccagagacaccaacatcaaaacattgcacctgatagaaaagaaaggaatagccttgaatgcattggcacagaagacaacttcctgaagagaacatcaatagtgcaggcattaagatggacatttaataaatgtttcctcatgacactgaaaagcttctgtaaggcaaaggacaccatcaaaaggacaaaatattcaaggtacagaatgggaaaagatatacactaactccacacctgacagacagctaatttctaaaatatgtaaaatcaagcaagcaagcaagcaagcaaacaaacaaacaaaaaaccctcaagaatctagacatcaacaaacaatccaatttaaaaatggggtacagctagttgtggtggtgcacacctttaatcccagcactcagaggcagaggcaggcagatctctgagtgaggccagactggtctatagagatatgtccaggaaagacagagaaactctgtcttaaagctccttaagacccaactataccaatcctgagcatatacccacagaacagtccacaaggacagttgctcaactatgtttataccagctttatcatgaaatttgcaggaaatgaacagatctagaaaaaagtcatccatagtgagacccagagagaaaaacacggtacacattcagttataagagtatattctctgtaaagtaaagaatcagactcagagaggctaagcaacaaggaaggctcagtgtgtggggggcacatgaatttcccttggaagataaagtagaatagatattgtgggtagactaggttgggtagggaggaggacaagaagaatcatgtggggaagggggaggacatggagcaagcgagagagagagggagagagagagagagagagagagagagagagagagagagagagagagagagagagagagagaactggaaagaggagaaggacattttggcagtgatgcagaaacctaacacaatggaagctcccagcaatctacaagggtgacctagctaggatccctagaaagtgaggacacagaaccttaactagccatctcctataactagatatccagtggagggattaggataccaactcaacctcagcacattcaacttataatttttcctgcctacaagatgtactgtggtgatacaaaaattgggggagtggccaaccaatggctggttcagcttgaaacccatagagagagagcccagggctgatactgactggaaggtcaggacccagagagaggctggatatcccagacacctcagatagaaccaaacactattgaaaaaaataagtcaatgaaatgattcctagttaggttctgctgtacttgtagacaggagtctagcaccatcatcatgagagtggtttcatctagtaactgatgcaaacagatgcagagacccacagcctaacattaagtggagctagaggaattcttggaaggagggcggagttgtaggagctagctgggtcaaggatgccacagaaaagcccacagaatcaactaacctggattaataggggctcacagacactgaatcaatagccagtgagcctacatggactgaccgatgccctctgcatatatattatggttttgtagcttagtcttctgtgggacttgtaacagtggaagcaaggggtgtctctgtctcttttggcctgcttttgggaccctcctcttttccactgaggcaccttgtccagccttcatacaagggaaggggcctagctttgttgcaatttgatatgtcatgtttggttgctatccctgtgaagactgcccttttccgatgggaaatggaggaggaatgggtgaactgggaggaggcaaaggggaggttcaggaggagtgaggggagaggagacagggtaagctgtgaactggatataatatatgaggagaaaaaataaattaataaaagagagagcaacagcaatccacgttttctttgcctaagcagattctacacaggtagtagacgtaaacaattccttttctgaaactttatgcatgtgtttaagtacatgaaattcagttttccagcaatgatatcatgcgctatatatagctacataacttgtttggtttaaatgacctcatttacttccttgttattaacctaaaagcacctttccactatacaaaattttctctaaagtacgttttgaggaaacatctgcttttacacaatggcagattccaatcagcttccctgcaaaggtgtggtgctgttgaatactccagcagtagtaaccttgccttcccacagttttgttttctgggagggcacatctaggcaacgccttgattttgcttgtcaatttacctgaggcttttgggagggccaggtgatggttatgtatacacagaaagagggtcagatccaagcacacggctagagcgcggcaggagtggtgaggtccagatcccatgggcctagagcatctgacaaagacagaaaactggagccaggctcacatggaaatcgggaaaaccatgctgagaagacaacagcaaggacttactgcattgttcctttcttttaaaaaaattagatattttctttacttacatttcaaattttatcccctttcttcctttcccctctgaaagctatcctgtctcaccccctcccccctgcttactaacacatccactcctacttccctgtcctggcattcccatacactgggacatcgagtcttcacaaggctaagggcctctcctctcattgatgtcccacaaggccatcctctactacattgagtccctccgtgtgtactctttggttggtggtttagtccctgggagttctgggggtactagttggttcttattgttgttcctcctatggggctgcaaacctagtcagctccttgggtcctttctctagctcctctattggggaccctgtgctcagtccaatgcatggctgtgaacctccacttctgtatttgtcaggcactgggagagcctctcaggagacagctgtatcaggctcctctcagcaagtacttgttggcatccacaatagtgtctgggtttggtaattgtatatagtacggatcctcaggtaggacagacactggaggccatttccttcagtctctgcttcccactttctctctgtatctcttcccatgggtattttgatcccccttctaagaaggatcgaagtatccacaccgtggtcttccttcatcttgagattcatgtgatctgtgaattgtatcttgggtattccgagcttttgggctaatatccacctatgagttcacagcagccttatttataatagccagaagcaggaaataacccagatgtctttcaacatagaaatgtattattcctttcttacagtaagagggagatttctatttccttacagggcagtgacataatagtagcatccttctgattggctaaattgttcttcaatcacagttgagaagttatatctgtgagagagggttgactgctaggagaacaatgattagtaagttggaaggacaaacgaataccttttctgtcctcattgtacggatcaatacaaatctacttctaaagccggacgtggtggcgcacacctttgatcccagcactggggaggcagagggaggcagatttctgagttcgaggccagcctggtatacaaagtgagttccaggacagccagggctacacagagaaaccctgtctcaaaaaacaaaaaacagttccaggactcagcagaacttaggaaattagtctgaacaggtgagagggtgcgccagagaaccggacagcttctgggataggcggaagcacagagccactgaggcagcacccttggcgggctgcagacagccggccaccgtccggaccagaggacaggtgtccgcctggcttgggaggcggcctcagcctcagcagcagcggtcgccatcctggttccaggactccgtggaacttaggaaattagtccgaacaggtgagagggtgcgccagagaaccagacagcttctgggataggcggaagcacagagccgctgaggcagcacccttggcgggccacagacagccggccaccgtccggaccagaggacaggtgtccgcttggcttgggaggcggcctcagcctcaggagcagcggtcgccatcttggttccgggactccctggaacttaggaatttagtctgcacaggtgagagtctgcaccacagaagctgacagcttctgggaactgccaaagcaacacagcttcggagaaaggccctgttttgggccttctttttcggccaggaggaggtccaaaaacaagatatctgcgcaccttccctgtaagagagcttgccagcagagagtgctctgagcactgaaactcagaggagagaatctgtctcccaggtctgctgatagacggtaacagaatcaccagaagaacaatctctaaacagagtcaactctaactactaactccagagattaccagatggcaaaaggtaaacgtaggaatctttctaacaggaaccaagaccactcaccatcatcagaacccagcactcccacttcgtccagtccaggacaccccaacacacccgaaaacctagacctagatttaaaagcatatctcatgatgatggtagaggacatcaagaaggactttaataaatcacttaaagaaatacaggagaacactgctaaaaagttacaagtccttaaagaaaaacaggaaaacacaatcaaacaggtagaagtccttacagaaaaagaggaaaaaacatccaaacaggtgatggaaatgaacaaaaccatactagacctaaaaagggaagtagacacaataaagaaaactcaaagtgaggcaacactggagatagaaaccctaggaaagaaatctggaaccatagatttgagcatcagcaacagaatacaagagatggaagagagaatctcaggtgcagaagattccatagagaacatcggcacaacaatcaaagaaaatggaaaatgcaaaaagatcctaactcaaaatatccaggaaatcgaggacacaatgagaagaccaaacctacggggataataggaatggatgagaatgaagattttcaactcaaaggaccaacaaacatcttcaacaaaattattgaagaaaacttcccaaatctaaagaaagagatgcctatgaacatacaagaagcctacagaactccaaatagactggaccagaaaagaaattcctcccgacacataataatcagaacaacaaatgcactaaataaagatagaatactaaaagcagtaagggaaaaaggtcaagtaacatataaaggcaagcctatcagaattacaccagatttttcaccagagactatgaaagccagaagagcctggacagatgttatacagacactaagagaacacaaattccagcccaggctactatacccagccaaactctcaattaccatagatggagaaactaaagtattccacgacaaaaccaaattcacacattatctctccatgaatccagcccttcaaaggataataacagaaaaaaaccaatacaagaatgggaacaacgccctagaaaaaacaggaaggtaatccctcaacaaacctaaaagaagacagccacaagaacagaatgccaactttaacaacaaaaataacaggaagcaataattacttttccttaatatctcttaacatcaatggtctcaactccctaataaaaagacatagactaacaaactggctacacaaacaagacccaacattttgctgcttacaggaaacacatctcagagaaaaagatagacactacctcagaatgaaaggctggaaaacaattttccaagcaaatggtatgaagaaacaagctggagtagccatcctaatatctgataagattgacttccaacccaaagtcatcaaaaaagacaaggaaaggcacttcgttctcatcaaaggtaaaatcctccaagaggaactctcaatactgaatatctatgctccaaatacaagggcagccacattcattaaagaaactttagtaaagctcaaagcacacattgcacctcacacaataatagtgggagacttcaacacaccactttcaccaatggacagatcatggaaacagaaactaaacagggacacactgaaactaacagaagtgatgaaacaaatggatctgacagatatctacagaacattttatcctaaaacaaaaggatataccttcttctcagcacctcatggtaccttctccaaaattgaccacataataggtcacaaaacaggcctcaacagattcaaaaatattgaaattgtcccatgtatcctatcagatcaccatgcactaaggctgattttcaataacaaaataaataatagaaaaccaacattcacatggaaactgaacaacactcttctcaatgataccttggtcaaggaaggaataaagaaagaaattaaagactttttagagtttaatgaaaatgaagccacaacgtacccaaacctttgggacacaatgaaagcatttctaagagggaaactcatagctctgagtgcctccaagaagaaacgggagagagcacatactatcagcttgacaacacatctaaaagctctagaaaaaaaaggaagcaaattcacccaagaggagtagacggcaggaaataatcaaactcaggggtgaaatcaaccaagtggaaacaagaagaactattcaaagaattaaccaaaggaggagttggttctttgagaaaatcaacaagatagataaacccttagctagactcactagagggcacagggacaaaatcctaattaacaaaatcagaaatgaaaagggagacataacaacagatcatgaagaaatccaaaacaccatcagatccttctacaaaaggctatactcaacaaaactggaaaacctggacgaaatggacaaatttctggacagataccaggtaccaaagttgaatcaggatcaagttgaccttctaaacagtcccatatcccctaaagaaatagaagcagttataaatagtctcccagccaaaaaaagcccaggaccagacgggtttagtgcagagttctatcagaccttcaaagaagatctaattccagttctgcacaaactttttcacaagatagaagtagaatgtactctacccaactcattttatgaagccactattactctgatacctaaaccacagaaagatccaacaaagatagagaacttcagaccaatttctcttatgaatatcgatgcaaaaatcctcaataaaattctcgctaaccgaatccaagaacacattaaagcaatcatccatcctgaccaagtaggttttattccagggatgcagggatggtttaatatacgaaaatctatcaatgtaatccattatataaataaactcaaagacaaaaaccacatgatcatctcgttagatgcagaaaaagcatttgacaagatccaacacccattcatgataaaagttctggaaagatcaggaattcaaggcccatacctaaacatgataaaagcaatctacagcaaaccagtagccaacatcaaagtaaatggagagaagctggaagcaatcccactaaaatcagggactagacaaggctgcccactttctccctaccttttcaacatagtacttgaagtattagccagagcaattcgacaacaaaaggagatcaagggatacaaattagaaaagaggaagtcaaaatatcactttttgcagatgatatgatagtatatataagtgaccccaaaaattccaccagagaactcctaaacctgataaacagcttcggtgaagtagctggatataaaataaactcaaagaagtcaatggcctttctctatacaaaaaataatcaggctgagaaagaaattagggaaacaacacccttctcaatagtcacaaataatataaaatatctcggcgtgactctaactaaggaagtgaaagaactgtatgataaaaacttcaagtctctgaagaaagaaattaaagaagatctcagaagatggaaggatctcacatgttcatggattggcaggatcaacattgtaaaaatggctatcttgccaaaagcaatttacagattcaatgcaatccccatcaaaattccaactcaattcttcaatgaattagaagtagcaatttgcaaattcatctggaataacaaaaaacccaggatagcaaaaactcttctcaaggataaaagaaactctggtggaatcaccatgcctgacctaaagctttactacagagcaattgtgataaaaactgcatggtactggtatagagacagacaagtagaccaatggaatagaattgaagactcagaaatgaacccacacacctatggtcacttgatcttcgacaagggagctaaaaccatccagtggaagaaagacagcatcatcaacaattggtgctggcacaactggttgttatcatgtagaagaatgcgaattgatccatacttatctccctgtactaaggtcaaatctaagtggatcaaggaacttcacttaaaaccagagacactgaaacttatagaggagaaagtggggaaaagccttgaagatatgggcacaggggaaaaattcctgaacagaacagcaatggcttgtgctgtaagatcgagaattgacaaatgggacctaatgaaactccaaagtttctgcaaggcaaaagacaccgtcaataagacaaaaagaccaccaacagattgggaaaggatctttacctatcctaaatcagataggggactaatatccaacatatataaagaactcaagaaggtggacttcagaaaatcaaataaccccattaaaaaatggggctcagaactgaacaaagaattctcacctgaggaataccgaatggcagagaagcacctgaaaaaatgttcaacatccttaatcatcagggaaatgcaaatcaaaacaaccctgagattccacctcacaccagtcagaatggctaagatcaaaaattcaggtgacagcagatgctggcgtggatgtggagaaagaggaacactcctccattgttggtgggattgcaggcttgtacaaccactctggaaatcagtctggcggttcctcagaaaactggacatagtactaccggaggatccagcaatacctctcctgggcatatatccagaagatgccccaactggtaagaaggacacatgctccactatgttcatagcagccctatttataatagccagaagctggaaagaacccagatgcccctcaacagaggaatggatacagaaaatgtggtacatctacacaatggagtgttactcagctattaaaaagaatgaatttatgaaattcctagccaaatggatggacctggagggcatcatcctgagtgaggtaacacattcacaaaggaactcacacaatatgtactcactgataagtggatattagcccaaaacctagtatacccaagatacaagatacaatttcctaaacacatgaaactcaagaagaatgaagactgaagtgtggacactatgcccctccttagaagtgggaacaaaacacccttggaaggagttacaaagacaaagtttggagctgagatgaaaggatggaccatgtagagactgccatatccagggatccaccccataatcagcatccaaacgctgacaccattgcatacactagcaagattttatcgaaaggacccagaggtagctgtctcttgtgagactatgccggggcctagcaaacacataagtggatgctcacagtcagctattggatggatcacagggcccccaatggaggagctggagaaattacccaaggagctaaagggaactgcaaccctataggtggaacaacattatgaactaaccagtaccccggagctcttgactctagctgcatatgtatcaaaagatggcctagataggccatcactggaaagagaggcccattggacacgcaaattttatatgccccagtacaggggaacgccagggccaaaaagggagagtgggtgggtaggggagtgggggtgggtgggtatgggggacttttggtatagcattggaaatgtaaatgagctaaatacctaataaaaaataaaaacaaaaaacaaaaaacaaacaacaacaacaacaaaaaacccaaaacaaacaaatctacttctaacaatctcactagactatgggggctggaaaccagggcccccttcactgttattactactttcttcttttccaacattacaagaccatgatactatttttgggaaatgtcatatggaaaattgacacctgttctgctcatatgttcccacacaggacagtttcaacagaatttgcatggcttttcccatgtcttatttcttttgttcctacttgttgatataaaagcaaagcaaagcaaagcaaagcaaagcaaagcaaagcaaagcaaagcaaagcaaagcaaagcaaagcaaagcaaaacaaaacaaaacaaaacaagcctcacgaaacagtatagtgtcactgtattagagaagatcagaatcccagccccagccacacagaagcaatgtgagtgagcctcaggcccttgctcctgctaagttcccattggtgaattcctaagtggaaccatactgtggctactgtgaaaaacacggaagcggccacacaaaaaccaccctgaagtatcaaattctgtttctttagctgtattcctaggattactggatcatgtggggattttactttaagtcagagtgtacatactgctgtgttctgctctgtaggagagaagagaagagagagagagacatagatttggtaccttgtgatctcaactttattatttttttcttaaaagtgatagcatcaaaagaacctatctttttaaacttctgtgggtctcagaacatataatgtgtgaatttacttagaaatgtggataaactattgcaattatcaggtaataattttgcctaatagaaatagagttacatacatcttagaccagatttctgagttcactcagatctcagcttgtacttgtagaacaggatatcaaaaaagctcttagaagtagaaaaagtgtgtgtgtgtgtgtttatgtatgtatgtatttgtgtgtgtgcttgtctgtgtgtttgtgtgcttgtgtatatgtgcatgtatgtgtttatgagtaggtgtgcttatgtatatgtatgcatgcatgtatacatttgtgtttttgtaaagtttgtatatttctaccatacatatacacgctagaaaatatctggactgtgttgctaagttttttgaggtaataattcctgggaagagattacttgactttctgaagctctaacatagactacgtataatttgaaaggccatgagagttagtataacttggatgcaaagacgactgtgaatataacactctttccagctctatgacataatatattccatctatttccttctgggtgcatagtcctacactggggtccttgattgcctgtgttcattaatgagtttgtgtgtctacatctggataaaaagctacggaaagacagactattgtacatgtcacacgaggaaactggggcactcctggatgttgcagggatggcaaagaggggagggataagaggtgcagaaaaaaaaaatgagaatataaatccctatcttcagttaagtggattcaatctaatctaaaagtctttcactttgctaaatatttggtataggctagtagtggagggtgtctgggccatctggagacttcaggacaaacaggatggtgaagagctaggtccctgggaagctgcagaaagagttcggctttccacagtctgtgggtacttaactgaattacacatgcactttcatgaatatgatggggtctaaatttactatattacatacgtggccatatatttatttctattgtaatttaacttaccagtaggagaagcaacacatttgttgtcttgtttactataatgtaattgttcataagaaagataatctaaattggatgtacttaaattgctgtgtgggaacagttctgccttggggggacatttgttagtctctaccagcacatcagttcaacaggttagtgatagtggtcagaattctgctatgcacaagagagacccctaagaattcctgaccccaaaccccaaaaatactagctggttttgtatgtcaacttgacacagctggagttatcacagagaaagaagcgtcccttgaggaaatgcctccatgagatctagccgtaaggcatttctcaatgtgggtggtgccatgcctggactggtagtcctgggttctataagaaagcaagctgagcaagccacacaaagcaatccagtaaggagcactcctccatggcctctgcatcagctcctgcctctaagttcctgtcctgtgtgagttcctgttccagcttcctttggtgatgaacagcaatgtggacgtgttagctcaataaaccctttcctccctaacttgcttcttgatcatgttttgtgcaggaacacaaagcctgactaagacacccaattaggcccagccgcaatcttgtgttagaacaatcacttactttacagagagaaactgagcaccaaaggggccagtgatatgtgcaaagtcgctctgagcatataagagaggtaggtcctctagtgtatttacatcgtgccatttagcttcaaagagctagtattccacatggaactgctgaaaaaccaatattgctgggaaccccttgcacttcagatatggtacataactgcacagtaaacatcagtccacagctagccatagttaggccaggcaagaagaaacagagaatttaattatgtaacacctattcagatattgtatgaaaaccattttcatatctgaccaagttactgtcccatgtactggatcttcacacacctcactactgcctggaggttgtaagaacttgcatttctagaacctacaaagggaagttctaagtgtgtctgccctgaggcccaaagacgggcatttccaaatgttccattcagatgctgacatagctagtagctagctttctcagaccactgagaaacactgcctaacatttgatggggaaatggcaaatgctggtctaagagtaaacttgaatctcacccttcatgtaatctcactttaagagtgattaatgttaattcacacaaaggactataatcatataagtggtaatttagacataattcaaatttcaaaaagtctaaaaaggaagaaatctgtaggtttttgatagcctatagagacaacattaaggaataatcatatgttatttgaggagaagagtgataccctaaatataataagtattatataaaaatattatatataaaataccctaaattggaagacatccaaacaaataatataaatattattctgtatgcattctttatttttaacattttatttctgctagactgagtgaccttgatctattgggcctgccgagctgtatctacggggatcgttgctattgacatcagtaatataaaatcaggcctttagggagccgtaactgtctcttcaaatgatttgggaaaatgtgtacatcttcaatcaattaaatacaggacaaatttagtcaatcacaaatgatcaacacgcccctgttcattgtgcttagcagtatgaaaatggcacccaggcaaattgatttcggtaacactccttttcattcttttaattcaatagtgagaagaatataaggcagttttcaatgttctatccacagtaatcctgtagttagtctgccttactgcttacaccagagctcatttgaagacacccaagcaaatgacaggaaacttttaactctggtcaagtcccaatcacagacccttgcttgccaaggacacaaaggaagccaaactttcaaacatgctgcattgatctccaactttttaaatccctctgtcattttaaatgaggtgcactcggttgtgtcatcatctcggttttaattgtgtgaaaatttcctgccaatctcacaccgctgcggcaacctcaccttgctacttgccctgcaagttctgcagtgtgccgttctgagtatgccgttttaactagttcttgcagcaggacacaaagcgagatagtctgatagaaccagttctcctctggttttacctttactcttagatgagttaagggtcacatcaaaccagggctcagcccgccagatctcctaagcacagcccctcctgacccaatgcagttaacccaacctcattcagcgctagtatcaaatgacactggagctgctgcagtatgcatcccgagactaagtaggcaggatttattatcagcagaagtcccctaactaccaggttattcaagctccgttcttgtcacaaacaggcgcggcggaagacacagtgcagcagactcagagctcatttacaagacaagcgaattctcagttagagacaagggcagcgcggcagcgaactgcagtaaatcttttcacgctcacagcaacatctaacaatgctctcctgcaacgcctcagatcaaacgaatcctacttggtttaaacatcaaatcaacaccataaaaaaggcttcattagcaaagttcaatttaggatgtttttaatcgtgtcttaattctagaaccagtgcgagactttccatgcttattcaagcatgctgacagaattggaacctcttagaattgcctacctgcacctatcagcctggctgacaggagcccgccaaaggattaaaaaaaaacaaaacccaaaacataaaatcatgcaaaaaaatatttacccccgaaagatgtatgtagttaaagctcagcttcctgcagcctcgatagcccctgaagtgttaatctgaagaaacagttccatgagtttccacaggccggtagtgagtctcctacacttgacctagacagacttacat

SEQ ID NO: 12 - RNA, 170057 nt, Mus musculus
uaaaauaaaaaauuaauuuuauuagauuugcacauuuuuuaauugugauuagcaucauuuugggcuaauaguagcauuuuccaacaugcaguucaugaauacgguuugccuaaauauuuuuuuuuuaagaaaaagaggugccuacggucugcuucuguaagaaacacaaauaucuugauguaauugacuauauaaguguaauccucucugauuuugaggaaaagaaauucugaagcccacauuuauauuuagaacaaucuaaagaagcaugauuucaaagcaaagaaaaauaaacagaaauuggggaaauaaagaaaaaaaugagaaaaaaaagcacucuggucaucuguuagcacaaacacuacaauaaauauaaaucaaauguuauaccuuuuccaauugcaaaucauaauuuggaugugaaguugugaguguauuuugccccuuaaaauuaugaaauaauccaaaauuaacaauuguaauaaaaaagcagagaucuaccacuacccagucauaguuucauuucuuaguuagcaaauaucuuccaugaaaaacugcuguggacagaaaguaagaaaagugauugugauaucaaccugaagauaauuuccucuucauauguacauaaugcugaaaaguaaaagaaagugacuuuguacaguauuuauauuugcuuauaaaacucuaaacauguuuuuaacagguuaagcaguaguguugucuuuugaacacguauguacagucuggcuauacauugaacguuauccacuuaaauuuuaaaaacaacccaaacauuguuaaagugcugcaaacuauugcuuaaugacuuaaagaaaugaagucugcugaacaguuuccuugacuuagccacugaccuaugguuucucgugagugagauucugagugcugagagaaacuagauaccgcaacgugguaauaucgacaugcauuggcagcauccacacuaucuacaaugguacagaguacaguauauuuccgguggacagcuugcacucuacauuucucgugguacauauuugaugcaauaaauacugugcuuacgucauuauuuguuugcucaaacgugcaccacagaguaaaaugacuauuuacauaauaaauagcauuucauuaacacauacagugucaaccuugcugagagcugaagauggcuaaacaaagugcaggaggaagcggggauuuauaaaggguucuuuuggucaauucgcucugcuaggguuggggguagggagucagagucauaauuuagagaccuuucagagacagugaacagaaauguagcgugacuccagacauuugaaugaaguuugcaccuccuaagacuugaugaccugucugaacaaucuccuuggacuaaggacuagauuuugacaaacccagcucagcaaagcccacgaucuagcgaucaccuccguaccgcccccuccccccgcagaaacacagaugacauagaacuguugaagaacugucuuugcuuuccuuucgacuuuuucucaugcaugauccuaaggugcaacaugcccucaugcgaaaccacaccguugugcagacgggagggccauaaggaugucaacacucccaggugacacaccgggaaaagaguuccuuuagucuauuucccaacagaaacccugcuuacaaaaauagucacauguaacaaacaacacauggauuaaaaaaaagaugaauccacuaacagaguuuguaaaaaaccugacaaauguggcaguugaaaugcaaacgguggauagaguuacuacacuaaaguguuucacauuaacccccaaauuauagcucugcaccccuuuagacugaucccuacagucugcauagccauuugucucuugucuucagcagugucagcugguaguuagaacaguacccuccugucaagguuaucuccccuuuacacagucacagaguuugccgacaagggggucacugucuuauugaggcacugaccuuaaagugaauuuguguaaaaacagucaguuuggcauugacuucuuaaaggaguccuuuugacuucacaggcuguaaacaauuugucacccaauuuauuauuuuuuuuuguuguuuuuguucauuucccuuuggcuuuuucauccuucccuuccugcucguguuucuccacgauuggcuuugucacccgaucguaggagggcggacaagcugcuguggacauugucaggucaguuuucuccguaauagaguuuucguuuauucugucaaugagcaugucuucuuuuacaagaagauuagccccaccuuugaguuuguucuuauuguaugugaaugaagcuuguuuuacuguucgcuucaaaagguggcgccuauaagcucgcugaaugauaacagcugacaccuccucuuguuugcguuuuaauguaguagugaugggcugauaagagaccuuggagggguuggaagccaugaaccgcucuuccaucuggauucgaagagcauccaucucuccacucucacccaacacccgcuuuguaaaagcaaauaagauguccaggcaguggaugcggucuccacucaccaugggcagguccauggcaaugagcugaaguuuguuugguuguggcaaauugagaggggguucuagagcagcugcaaacugagauaauuuuucaaauuccaugaacuggguggcgucagggucgaacuucucccagaccucguagaacaucucaaagucguccucacucagaggcucugcacuuucuucuguggcaacgcugaaguucuccaggaugacagcaauguacauguucaccacaaccaggaaggauaugaugauguagcugacaaaaaagaaaauccccacagauggguucccacagucucccuucaccgagcuuccaggguuaacuuuauuagggucacagucaggggguuugcuguugaggaugggggccagcaguccaucccagcccgcagagguggugauuuggaacaggcagaucaugcuguugccgaaggucucaaaguugaacaugucaucaaucccaacuucccucuuaacauaggcaaaguuggacaucccaaagauggcguagaugaacaugacgagaaaaagcaggaggccgauguuaaacagcgcaggaagggacaucaucagagcaaagagcagcgugcggauccccuuggcaccuuugaucaggcguaggauucguccaauccuggccaggcggaugacucggaacaggguaggagacacaaaauacuuuucuauuagcuccgcaagaaacaucccugugggaagauaauuaaacuaucaaucagugaagaagucaucaacuaaucauuuauuaaaauauuugaguuauuaaaguuccaaugucaauuucagaguauuaagauucaauuuuguaaucuuggguaugguacaaauauauuccaaucauuuuccaguaucugcagcugauuugucccaggaugcaccucuccuccuuagaacaucaaaauucaaggacugaaagcccuuuauaucauauggcagcacauuugcauacaauuugucuauaccauuuuauugaaaguuuugaauuauauuuaaaauguucaucacauuuaacaaugaaaguaccaugugaagaguugcugugauauuccagaaauccaauccuaacuaaacaacaacaacaacaacaacaacaaaaaccaaguaaggcugaguggagguggaucccaguacucaaaggcagagggaggggaucucuguuagugugaugguagccuggucuacagaacgaguuucaggacagccaaggcuacauagaggaacccugacuugaaaaaccaaaccaaauuaaaaccaaccaaccaaccaaccaaccaaccaaccaaccaaccaacaagaaaacaaacaaacaaacaaacaaacaaaaacaaaaaauccaaaacagaacaguugcuaccguucauuauauuaaaaauggucaggagaggagcaugguucuuaaaaauacuuuugaucuguguuugaauuuucagauauuuaauacauacauauggaaaacugaguguuuauagaauuauacgauguauaauaaaaguuaacuuuagcuuuuacucagccucagcaauagauuaaaauuuaagaaucauaguacagcucgcccccccaagagcauuuauuuauuuauuuauuuauuuauuuauuuauuuauuuauuuuugguuuuucgagacaggguuuuucuguguagcucuagcuguccuggaacucagucuagaccaggcuggccuagaacucagaaaucugccugccucugccucccaagugcugggauuaaaggcauguaccaccacgccuggcccgaagaguauugauaugcuaugguuaacuuaaaaucucaucagaaauaaauacgaaaauuugcuucaaugucaacagccaacaauauaugaauaugauguuuuuucucuaaacuuguugaaccaaacuuuucuuuuucacacuucacuaaucugaagucuuggaguguuucaugcuguuuucauccucauaugaacuaauauuauuacagaauuguccgugcaugugccuguguguuugcaaaacacuccaggguugauguucuuuuccucuccuguagcaaaaucucaauuuuuuaauuuuuacagcuuuuuuucucccugugauuuuggguuuuuuggcacauguauguucauguggcaugugcucucucucucucucucucucucucucucucucucucucucucucgugagugugugugugugugugugugugugugugugugugugugugugugugucuuaccugaggcugaugcugggagucucuuugauugcuuucuacuuuauguauuuauuuucaauuuuuaaaauuuuuauugguuauuuuauuuauuuacauuucaaauguuaucccccuucucauuuuccccucccaaacccccugccucuauaaggguguucccccaccaucccaucaacucccaccucagggcccuagcauuucuuuugcggggucaucgagccaucacaggaccaagggccucccuuuccauugaugaaugacaaggccauccucugcuacauauguggcuggagccaugcuccauguguacucuuugguuggugguuuaggcccugggagcucugggagcuuugggagcucugguugguugauauuguuguuccuccugugggguugcaaaccccuucagcuccuucaguccuugcccuaacuccuccauugcagucucugugcucaggacuucucaauugaacacagagcucucugguagcuugccagauaauuugagggguuccaagagccuucuuuauaaggugucacccuuggccaggauuuacacuggugcugggaaucuguucucucguucucaagcuugcacacuaagugcuuuagaugccacugcauuucucagcuccccccucuguccuuuaaauaaagacuccauuaaagaguacuuccaacacaaacacacacacacaccaccaccaccaccaccaccacuaccaucaccaccacuaucaccaccaccaccaucaucaccaccaccaccaucaccaccaccacugccaacagcaauaacaacaacaaaaaccuaccuauucaaccaaccaaaauacccaaaugcaucauuguaugcaaagcacaaaagcaucauucucuuuagucagccuucucuaucucagucucuaucucugucucuuucggccucucucuuuuugaugcuauuuacaugauuauuguuggaauuaaaaauuacauauaacauauggguuggauuuuagauguaaggccuauuuauucagaggggggaauagcacacagaucauuccaacugaguccuaugcuugaaaauuugcaaugauuucaucuuaauuaggaaugaaguucccauacagggacuucuucacuucucugaagcauuguugguaucugcagugagaugaguuaccuucaugaggcucuuauguacuacacaauuuguaggauaggacuaagaaagagauguuccaugcuaccaguuuccuucuggaaauauugaaaauuucuguaugaaagccacaagaaacuacuguuagucuacuugcauuucccauuuacuucuauccauguucuacucugcaugcuggugaccccauuaacuacaucucuaauguaaugucuuuccugaccuucagaccagauucucaguaccccucuuaccagaaucaucuagaucaguggaucuaaaccuuccuaaugcugcaacccuuuaauacaguuucucauauuguggugaccaccaaucauaaaguuauuuuguugcuucuuaauaauuguaacuuugcuacugcuaugaaucuuaaugcaaauaccuaugauuucuaauggucuuaggugaccccuaugaaagggcuauucaauccccaaaguguugcgaccuacagauugagaaucauugaucuggauagcguauagaguguuuaaucucaaccaccuaaaagcacuuuuuaaauuuugguucaccacaucaaucuauuuaauauaucucaauaaaggagaucuuauuaauggucaaauaaauaugugaugcaaugggauaaaauauuuguauaaauuagaagccuaauuuuggaagaaaaacaaauacaacucaaaaacacaugccaacauauugacuuugaguagugagaugccuuccacucuaaauuccuguuuucaaccuccacuuuuaucaggaggaauuugccagacuuugcacagaucuuaccuacaauggagaggaugaccaccacaaaaucgaaaauguuccauccaauggugaaauaauaauggcggagcgagaugagcuugagcacacacucgccggugaacaggacgaugaacaccagguugaugcgugacaaaaugcuugucacauaaucgcucuggucauccguuuccaccaucauggucaccauguucagacagaugaggaucaugaugcugauaucaaacacuugucugguuacaaagucaaaaaccauuccuugaaauuuguucugcagagaaacaaagacacuuucagcaaugcgggagauuccugguagacagcauauacauuaaauacuuccuauauucccuacuuucuaguauuguacauaguaccuaccuauugggacaaauauuuguaauuggugccuuguagaacauuuuuauaucuaguuaauuaaauuuuuguuuugaggcaugcauauuccugaauacaucaaucccuugcuguagauucuuucccugcacacucuuuacagaaacacacagugaauuucaacacaucaagguuacagaacuguaagaaaucuguuugauuugcuguugccaaacuuuggcucacuggcuguaguacuuuccaaugagcagcuagacaauguggucauuuauaaacguaauaaauauuagucuuaaauuugcuuuguuccuagagaauuaucaaaggaaccuugugauuucaaggaugcaucugaaacaccaaacauuuacauuccugcugggcaaguagcacuugggggguagaggcagguggauuucugagccagccuggucuacaaagggaauuccaggucagucagggcuacacagagagacccugucucaaagaguaaaauaaaauaaaauaaaauaaauuuacauuucaccuugacaacauuaauuuguucccagcaaguggucuuugcugauauugucagacaaauaaugaugagucuccacagggguaaucagacugaaaagacauugcuugcuaugcuauaacaaagggagcacauguccuucgcuacucauguguagucagcugagguuaggcccaguacaccaucuucugcuuauuucuuugggccacugaagaauccuaagcauauuuuaguaccauaaaauaccccugcugugcaguacuugacuuguguagcacuaaguaucaauggggaaaauguucucauuagacacuuugccucuucuuagaacugggaacaaaacacccauggaaggaguuacagagacaaaguuuggagcugugacgaaaggauggaccaucuagagacugacauaucuggggauccaucccauaaucagcuuccaaacacugacaccauugcacacacuagcaagauuuugcugaaaggacccagauagagcucucucuugugagacuaugccggggccuagcaaacacagaaguggaugcucacagucagcuauuggauggaucacagggcccccaauggaggagcuggagaaauuacccaaggagcuaaagggaacugcaacccuauagguggaacaacauuaugaacuaaccaguaccccggagcucuugucucuagcugcauauguaugaaaagauggccuagucggccaucacuggaaagagaggcccauuggacaggcaaacuuuauaugccccaguacaggggaaugccagggccaaaaagugggaauggguggguaggggaguggggggggguaugggggacuuuugguauagcauuggaaauguaaaugaggaaaauaccuaauaaaaauauuaaaaaaagaaagaaagaaaguagugcuugaacuggacaguaguagagcaugcuuuuaaucccagcacuggggaagcagaggcagguggaucugaguucaagaccagccugaucuacagugugaguuccacaacagccaaaacuccaaagaaaaacccugccuccaaacaaacaaacaaacaaacaaacaaacaaacaaaauuggcuaguacaauagaaacauucacuaagauucuguuuuguaauucaucauggggaauauuuuaagcuuaagaucacugccauagucaaggacaccacaagaagaccuacagugucaacuauccugggaccguggagacucacaaagccugggccaccauccagggagcgugguggagcuggaucuagguacccuacacauuuguagcaagugugcagcuugucuucauguggguucccuaacaagcugucucagucucugcuuccugucacuggagcccccuccucuuaccuagacugccagguuaguccuuggugggagaggaugugucuaguucugaugggacuagaugucccaugguggagugguauaaaagggggauccccuucuuugaggacaaggggaggggacaauaggaagaaggauuuguugugauggugggacuaggaagagaggagggagggaggcugugauugggauauaaugugaauaaaagaaauaaguuauggaaaaaaaucacugucauaaaaauaaccaugauaagggcucuuucuccuuuauaguuuguagaugaaucuuggaaauaugagaaugguuauuuauuaucacaaauuguaauaaugccgacauaagcaauugcugauuuuagagccauacaaaaacauauucauuacugggaugcucaccuccucuaaaaugguccauauuucuacuuauuaaacaacaauuacaaguggagaugauaugccauugagcaucuuuucuaccucuuuaaucagaaaguaaaugaauauuagccccacccuaugcuucuguauugcuugacauugcacugcagcuacuguaaagucauaaagacacaacuauugugaggaccacauuagucuacguaguuuggauucuaaguguguaguuguaggucauuuggagacaaauuugcauuuucuguauauucuuauucuuuuuggucuuuaaaaaaaauaucaaaacauagauuagagauacucaaaagguuuuuuuuuuccuuuuucuuuuuucuuuuuucuuuuuucuuuugugcugggaaugguaguugauuuccccugagaaacaaaacucauuucagguuguugcuuuauauuauuuucauuugauauuucuuacuccaggucgagggauaggcuuuuguggcuuuuuugauccuaauuucuucauugcauuauaguauuucuucuguucuucugucauaaagaugucuugaccuccaaaguauagaaaaaaaaaucaaagcugguuaaaauuguauccauucccucauaacuuuucaauauuauaacaagagauuucaagagauuaacaugguuauccuugugacuuauuuugaauuugaaaauuaaaaguacacuguauugacuauaauacuuaaguuuuaagauaacuaaaauuggcauuauuauuauaauuauugaaggaaaaaagcccagacaugguaaaacacaaagcuccaucuuccuucuggcccacacuuccaccuacagucagggaccagcacccugagcucuccuucacaaccugucugccucaugggaguucuucucccaccagaacaaccagcuccauguuucaguccacaccucuaccugcaauuggggaucuauacccuacaccucagccaacagcucugcuugccucuggggagggcuuuagcuaucuaggacaacaagucucugagaguuacuacucccaaggacuuacaggccagccaacaccagagaaaaaaauagauggcgaaaggcaagcucaauagaacaauagaauaaucgcuagaagccagugcaguauggcaccuucagaacugagcucucuuacuacagcaagcccuggauauccuaacacaccugaagagcaauacuugaccuuaaaucccaucuuaugaagacaauagaggccauuaaagaugauauaaauaaagcauaugcagaauauaggaaaauacaacuaaacagguagaaaucuuuaaugaggaaacaaauaaauccccuaaagaaauaugaaaaauacaaucaaacgggugaaagaaaugaauaaaauggacucagauuuaaaaauagaauuagaagcauuaaagaaaacacaaauggaagcaacccuggagauauaaaacugaggaaagagagcagggacuacacacauaagaaucaccaacaaaauacaagagauggaagaaagaaucucagacagaggaaaugcaauagaaaaaaauuaauacauugauaaaggaaaaugccaaaugaaaaaaguucccaacucaaaacauucaugaaguugugauacgaugaaaagacuaaaccuaagaauaauagaaauaaaagaaggugaagauucccaguucaaagggcuaaaaaauaucuuaaacaaaacuauagaagacaacuuuccuaaccuaaagaaagggaucacuauagaagcuuacagaacaucauuagauuggaccagacaagaaaauuuuccuuccacauauuaaaacacuaaauauauagaauaaaagauagaauauuaaaaacuacaagggaaaagggccaaguaacauauaaaagcauaccuaauagaauuauaccugacuucccaacgaaccucuaaaagucagaagaucuugcagaugcuaagagacuacagauagcagcccagacuauuauacccaguaaaacuuucagucaucauagaugaagaaaccaagauauucuaugacaaacccaaauuuaaagagaaucuuucuacuaauacauccuauaauggauacuagaagaaaaacuccaacacaagaagaguaacuacacccaagaaagcacaagaaauuaaucaucuuacaguaaaaccaaaagaagagaaucacacacacacagaaccaccacuaacaucaaaauaagaggaacuaacaaucauuggucauugauaaauuugaguaucaguagacucaauucaccaauaaaaagacaggcuaacagacacguaaacaauuuccaucauuuuguggcauacaagaaacacaccucagcaacaaaaaaagacacuaccucagaauaaaggccucaaaaaaaguuuuccaagcaaaugaacccaagaaaccagcuggaguagcuauuuuaauagcuaauaaaauagacuuucaaccaaaauuggcaaaagagauggggaaggacacuucauacucaucaaagggagaauccacuaagaugacaucucaauucugaacagcuaugccccagaagcaaggaaacucacauuuguaaaaggaacuuuacuaaggcucaaaucacacauugaacccuacacaauaauaguaggaaaugucaacaucccacuuucaccaauggacaggucauugaaacagaaacuaaacagagaaucaaugaaacuaacagaaguuaugaaccaaaugaauuuaacagauaucuaaauaaccaccccaaaaccaaagaauguggcuucuacucagcacuucaugagcauuuucuaaagcugaccauauaauugggcacaaagcaagccucaacagauacaagaagauucauauuaccccuugcauuguaucaggucaccagggauuaaggcuagacuuaaaaaaaaaaaagaacaacaacaacaacaacaacaacaacaacaacaacaaaaacccagaaauaacagaaagcccauaaacuuauggaaacugaauaacucuauacucaaugaucacuaacuuggucaggaagaaauagagacagauaccaggugccaaaguuaaaucaggauaagaauaaccaucuacacauuccuauaaccccuaaggaaauagaagcaggcauuaaacuucucccaaccaaaaaaaguacagggucagaugguuuuagugcagaauucuaccagaauaccaaugcuccucaaacuauuccacaauauagaaacagaggaaacacuaccuaguucacucuauguggccacagucacucugauacuugaauuacacaaagacucaacaaagaaagaaaacuacagaaccauuuugucaaugaaaauugauacaaaaauaaucaauaaaauucucccagacccaauucaagaacacaucaaaaacaucaucaccaugaucauauaggcuucauaccagugaugcagggaugguucaauauguaggaauccaucaguguaauacuaguacuccccaaauucuuccaaaaauagaaacagaagaaacacuaccuaauuaauucuaugaggccacaguaacccugauaccuaaaccacagaaagacucaacaaaggaagaaaacuucagaccaauuucacuuaugaacaucuacgcaaaaaacacucauaaaauauucacaaaccaaauugaagaacacgucaaacacauaauucacuacaaccaaguaggccuuucaucacagggauacagggaugguucaauauaugaaagaaaaucuaucaaugcaauccacuauacaaacaaacugaaagaaaaaaaucacaugaucaucacauuagaugcugagaaaaccuuugacaaauccaauacuccuuuauguuaaucauaauaaauaaaaaaugaaugcaacgaacaaauaguaugaaaucaugggacauaaagaaauauaauuggcugggaugaacuuggauacauccaaaacuauuugccauaaaaugcacaaaaaauaaaguuaaauuuuguuucccuuuaagagaugucaaauauuaacaacuaaagggaaugucuggugucugugagagugguggagcaaggucaugcucacauagcuuauucaguugacuaguuauuuaacuacaaggaggcaauauacuucacucuggaauuuaauguaagaaaagauuuaaacacucaaauguuuugcaggaaaaaauuacuuaagucacuaaagauuagauagauugaaauuggccaaguuaugauaaauaaacaugaacacuuuuaacaaacugagaaaucucugugauaaaaguauuuaaaauuguacauugggaaacauuucagggcugggaccauggcuuagugcauauaggcauuugcuuacaauccaaaucaccuggauucaaucccugggacucaaaggguggaaggagggagaccauauccuguaaguugucuacugacuaccacacacccaguguggcaugaauaaauaacuguaauuuuaaaaaguauuucagagauggcugaagugauaaauuuauuacacauuggcgugaauauaagcucagaucccaacccccauguuaaagugggcauggcacuauguuauuaaaacaaaaaccaaauggugauggggaugcagagauaagaugaauccauuaaucucacuggccagccaucaaucugaauugaagaggagauucaaugagaacuccugucuuaaaaauuaugguggguagugauugagaaaggugacuaauguuuaucacuggcuuuuacaugcauguguacauucauccucacagacacuugcacacaccaccacgaauacacauacaacacaacacaauacaacaacacacacacaacacacacacacacacacacacacacacacacacacacacacacacacacacagagccacauauguacacagaauauuucagggucagacaacgugauaugugacuauaguuccaauuuauuugagaaggauacagggcugcuacuuguuuuaggucacauagggccauauagugagaucaggucagccuagauugaaaagugagaccaucuuaaaagaaaaaaacagaugagaaguaguucaaaaaaggagacuguucauggaaagaguuugagcagacaaagaugaaauguggaccauuguuacuacugagugauaauauuugcaugcuuccuuuagugcacauauauaauugaaauaaucaaacaugccuuaagaaugauaauagauaaaacaaaaauuccucaaauuagaacuagaagugguugcuauuaauuaaauaaccagaagaaagaaguacagguagaaaagaguacaaaagaaguauauacacugaaccguauuuuaaaugauggauaauuacugacuauguauaaucaugggauuuagugugauauuguaguacagacaugccaguguucucugaucaaaucuaaccccuuuucccucaccuuuccacaugcuuuuccagccucuagugaucuuuuagcugcgaauaccuuauaaaggggagugagugaggaguuauuaaggauaaaacauagggaaaaggucgugagcuauuugguuucugaauucaagaucucaucuugaauuccaauucaaauagaauguuaauuacucugauuccuuguguuaggaaaaauuguaaaaauacuuaucuucuucuuuugcugguugaaauugucgauaaugacaccaauaaacagguucaggguaaagaaggacccgaagaugaugaagaugacgaaguacaaauacauguacaggcuuuccucauacuuaggcuguaguucaaccugccaacggagggaauuuguuaacugauaaagcaguuugaauacugggagcaagucggugcuucuacacaagaguagaaggcuauauauauucuuagaaauaauuuaguguauuuuauucccauaucaacagccucaaagaaacaaaaaaccaaaaaccauccuugaaacuaggaagcaaaaaguuuuuguguaaaaagugaugcaauucgucacucuaacacuaauugcauaauuuuacauaguauaacugacauucuguuauuuggauaauagacuuuagauuugguaaguuuuaaguuaauugauuuucaguaauuugaaaauacuaguguggugucuuaugucugugcaacuccagaauuugggaagcugaggcuggagacuuguugaguacuauucuagccugggccacaaugcaacauccugucuuuaaaacaaccaaagaaaaaguuagugaaaaauuagcucuuauaaauauagagaggacacuuuuauagucaagauucacuuguguaugaacuuauauagcaaaugaaggaacugaaguauucauuuggaugcuggcaucuugcccuaccaguaacaaagucauuaaaauuuuuggauugaauagacacguucaaugauuuauuuuauaaaauccuccauugacgacugacucucagacuugcaguuauaaaaauagacacagggcugucacucaaugcauaacaauggagucaauauuuaguauaaauagguaacuacugcagucuucuauuuuuaaagacaacagcuaaaauuaacugaacaucuaagacaaacucuaugcaacaaggugagaugaugcaauuccagaggugaucaagaaguuuguaggggaacaggacgauuucaaauuuaucauugucuccauaguaagcuagaggucuggguuaccgaagaaaaccaaaacaagaacaagaauaaaaaaacaaaaacaaaaaacaaaaaacaaccaaguaacaggaaagaagaaaacagagauuuuacaguuuuggagaucaaucuuagaggaagccugugauuuuugaguacaucugaaagcuaggaaaaguauggaaucaauaaaguagaaaugauaacaguguugguacauaggaaagcuaggaaaaguauggaaucaauaaaguagaagugauaacaguguugguacaucugaaagcuaagaaaaguauggaauuaaaaaguagaagugauaacaguguugguacacacuccagugaaugcaugggugcuguucuuauaaaggauggauuuagaaaagacuaugacacauuucuaagauguuuagccugcaucuuuagccuuucaggcuucaaagcauggagccugccuacacaguucagcuacugaagacagucauauauucuucuauguccuuuauacaacaaauagaaacacuuuggagaauaucuguugcuuauuaaaugaaagaguugaauuuuuucuuucauuuuuugacuuccauuuuuuuuucugaacucaguacaauaucucugauagacacugcuguguuaaguacaaacucaauauacugucuuccuauuuuuuaauuaacuaaaauggaguuaguuuguuuggcuaauucauaagcuaauuuaagcaccaaaucaauauuuccagaagacauuggauauaaaaaauacuuacauuucuggaaucaacugcagcauacaugauauccauccagcccuuaaauguggccuguuggaaaggacaugcaugccuuaauuuggguuaaauuucaaaacugaugcuuacuaauauccuuacuguacauguuuaaagaaauauuuuaaacuauuuucaaaacaaacuuuccuuggauuuugaaaaaaagauagaaagccaacaaaauggcgaucugauauaacuuccuauuuuccaaccagcucuaaaguaacucucaagcuuaacauucuauuacaauuuggaagaaaguccuagaaauguaaguggacuuggcagugucuacagcaagaacaaauuagaucugcgauauucugugggaaucucgucuucuaggugaucaaguugacaguauuuaagguuuuucuuuaugcuuacaguguauggaucauaugggcauaaagaaaaaaccugaagcuauucuuuuaagaauuuuucagaaauaacacuauauucauuuucuaugggguaaccccugaaaagauuguguaaauauaauuaacaacauaauaaaagugugacaaaauaggacugacacuugucauuugcacauugaugagggauuccuccucuaaccucuugcaggcauuugucaugugucuuagaacacaaguuugaggcuacaggaccugaaauauauauuccauagucaaugaggaagccucgcauauuuuugugauuuaucuuuguauuuaaaucauugacucuuggaaaaugugggagugugaccagagacuaauguaucuuagucagaaaacggaaauucuuuucacaucaaagagagagaugggugaugugucaguggcuuagaccaauuauagaaccugucuaucacacacuuccuacaggaacagaaaagugauuugaccuauuucuaugaacuuacucaucaacagagaggugggcgaaauagucaagugugaaauuuuuacuuaguagcagaacauguuugagaguucugugcacuuaucuggauucacaaauuuguacuaacagaugauaaugcugaaaacauauuauaaaguuucuuccuaacaaaauaacagcugcaauaaucacuuuguuauuauucugagcaauaaaaauuuucagagaaaauaguguucacuuacaacuugaagcaaagaaagauacccaaauccuacauuaucaaaguuuacuuucacauuuuuccaccgggcggucucauuucuuucuauuaguuuuaggcaaucagaaugauuauugacuucgcugaucucaaauaugucaccaguugugguguuaacacagugguagaauuugccagcaaacaaauuuacgcccaugaugcugaaaauuagccagaauauaaggcaaaccagaagcacauucaugauggauggaauugcuccuaacagggcauucacaaccaccuaauacacaaauggagagaaagagaagucagaauccuuauugauuaaaagcaaaaagacaucccccuaggaaucauugauuuauuuucuaucaagacuacuuauccuaucuguguaagagcaaagcagaaauaaucuuaacauaaaacucagucuuuuuuaaauauuaugcuuaggaaaagaaauauaggcaauaugcaaagagauggagaaaagaaagaaaucuaauauaaaaaaggugcuaaaggaaaagcaaaaugggagaaguuagcuccuggaugaagacacauguguaguuuauuagaaaaaauaaaaggaggagagagaaguaggaacuccuaggcaagagauuagcucauaaaaaaaaaucccaaaacaaaacaguaucucaaagaauagaacuaaaacauuugggcaugaauugauuggaccaauauacuuuaaauauaaauuaaaauucagauguauaaauauaaaacuauuuuuaacaucuaauauauuuuuggccuuaauuauccaugcauugcuauaacuaauaguaguuuuugcauaagaagcaagacaauuuagcaucauguauuucaguagaucaucacaucguuuauuucaagcuccagucaugucaguuguuucauuuacugaguuuaauucaauaaacuuaucuuaaaugaaacacuagagagaucauuuucucaggaaaacaggaaaaagagggaugucauacguacuuaucaacucugaugugacugaguaaaguccugugcuaaaauauuuucuccauuuucuaaugucaaagauauuucccucucucuuguccuuaauucgggacuacagauuuaaaaugggauuuuuuuuuuuuauauuugacauaugguagucuuggcuuccuucucuauagcucaccauugaacugcacauuaguaacuaagagggagauaaaggcuggcccuaaugugcucuuaauuggcaaguguguuucagacuugaacauggacgucagauuaauucuacucauguugggggagggggggccugccacuuuuguuaguuuaauuaugaauaucaucucuuugauuuuuauuauaguauaauuuuagaaguuuuugccugucugacagaaguauaagagccaauuccuuguacuucugagcccuggcugaacuuuguaaggaacaauauccauuggggaauacaaaauagugggcuauguggccaagggaaaugaaaccaguaacaauaaagaugagggaugaacaugaagaagauaauucagagugcgcuaucaaggcagaagccaaagauaggcugauguguagaaauuaaugagcaacuaucucccuuuauggccucccuaaaaaauuagcacacaggcuuuccuguauauauuacuuuuuaaaguuauuuucaauuuaauuuuuaaauuauuaagaagagauuuaaaaacauuuuaauguaauuuuuuaaaaaauuguaccccuaaaguuguuuauuggauuugagauaugaacacugaaauugaguaguuguuucucauuucugaauacuucaucucccacucacagugaggugcucugucugccgaggauaugaaauccauacuaacaugcaagcuuuucacuuuuaacacucaugacacugaacauuuugguacaagucuguagguuucaugcugcuuccuucaaaccuuuccaccuuggccauuggcccuguucucuaucuucgcucuguccucgguuacuaagaauuacauucuuaucagauuuuauuugcuugccuucuuucaguauggauacuaaauuuaucuaucccaugucccauuuugaaaaauuccuuaaugguucucuagccauuagaaaacauuucucuuucuuuggcauuuacaucacucgacaguuugugagguuauuuuccucaaaacaguuugcaacuauguuuauuugugugugcaugugggcaugcaugcauuuucuauagcacuuggguggaggucacaggaaaauuugcaggaauuauuccucuccuuuccaccauguggggucaguucuggggauugugcucaggugcuagacuuggcugcugaaggauucucacaagccugauacauuuccccuuucagcuucccuaacuggugacauacacuucacccuccucugugacagucacuccacgcuaagguguuagucugagaauugagagccuucuuucuuugaaacucccugccaaguacuugcccuugaaauaaucucccuccuccaggcuuuagcucaaauauacaugucguuuauugagucuaacucuacacauccuuaacaaagaugagaguguuugccuucgaauugaggaauuauaauuuaguacuggaaagagcaauaaggacaauuuggugcuugggguucauuuggaaaauuagacuaaugaagguaaaacaaguuagguucagaaaguagaccagaauuggcaucucauacucuuuucuguuuauccugcaaguuuuuucaagaguuucaaccucuuaugguuuucucugacugcucugugugaaaguuaaauauuuucuuauauuccaauuguuagauuaugaugcuucaaugugucaaguguacauaugugugcaagugugcaugcacauaugugagcauauauguggaagcauagagcuguaugggaaauacauguauagauguagaggaaagagauguaggggucggggggggggauucuuucuuauuuauugcaccaacugaauucagagcuugaggacagggcuaguuucaucuuucuagcucuggaauuacauguaagcuacuaugcccauccgacauuucugaggguucuggauauccaaauuccaguccucauacuugccuggcuaaggauuuaaccacugcauaagaaagcaguuugcauaauguaauaaaugggagagauuuccuuugaagaagggacugguuuugaauuaaaaguaaugcccauuagugaauucaggauggcaaauacuauauaggaaugcaguucaggaaaacgugcaaauuugccauagauuuggcccagugagacauuuauuuuacaaggauguuugucuuagagaacauuuggcauaggaucagaggauuugccacugaaaauccacuuaaaguugcgauuucauuaacauccagagcaaaagaucacaaacggauugccucucccaagagcccaaccaucccuugguucuacaauauuaauucuuugcagucucuagggagagucaguaauuggcucccaugugggaugcgcugggaaguguuggucuaagucaauuggaaagaacacauugagguuauaagguacauaaaaggagaugucuaagagagaaguaugcuuaauggguggauuguagagguugucucuucuaacaauguuuuaaaaggacaucucccagcagaauuucuguauugucacacaaccaguucuucaagucuauuucuucuuuaggguucauacuuuuuauuaaaucagugaaaaauuaggaccaggcaaauauucuuguugauauuagaaauuucagugcauuugaaaguaucaucuaagugaagacauuuagauuaguuuuuuaagucaccggaaaccauggguucuauagcuuuucuaagaaauagagaaaaaccauaugugaauaagaauuuaaaaaauggaaaguaaaaaucaugaguucuuaauaugaaauauaaaaaauuuuuagaaaagccaacaacuaaaucaguguugugaaauuuuauuaagauaaauauuuuugauagauaaaugccucaauuauccaaacaauuuuuuuuucuuccaaacaauaaaaauuaucuuucuuauccaagacuccuacauuuuaagaggaagcagaagugucaguuuggcuuuuuauuuuggggugcacugugaugccuucuaagauucugggaaguuaauugggguagcuuacaaggaguuggcuuauacaccaauuucuuagugcucaugauuuuuuuguuuuucaugcauauccuauucuuuauacuucaaugaaguugacuuuucacauguuuugguuuuauaacuuaaagcacaucuuuuuuuuuuuuuguauucccuuguuucacagggaucuugccuugcuacuuucugcaaauaacacauuuuuaugcaauaaagaugagaaugaucauaaccauuggcaacccugagauaccuggccuguuguaccuuuagccacugcucgcacacaucaacgaucaacugauggaaugugacuggcccauugagggaccagagcaguguguugaaaaaauaaggacuauaugcucugucacuaccaugagcuugacaaaugaaaacguuuucaucagcauccuacaccagggucccccacccucaccaauugaguaauuuccccauaaauggacaaugaaguauaaauagcuaaaucauauucagugaaacguaauaaagauauguacuucugggguuauaauccacagaugguaagucagagauaacuuuuuuuuucccaaaagaaguuuaagcucauuaaaaguaguggauuuggaaauaaauccuguauugucccuacuguggugcaauuguacccuucccacucccucccucaaucccacuacacauaagucacagugcaaggauuaaagguagcaaaagggguaauacaguacccauaauaaagggcugaggggaggaaccaccgcuccaccccauccaaguuggagcaagauuauccuauauaaaauagaaauauauaguuuauuauuaguuagaaagcugauaugacagaacauuugguguuacuuuuuguauaugaugcucacugccuguuucccuagcaacuaagacuugaguucuuuggaaaagguuuuuacgauuuucccagcuugggaaauuaaaacuacgaauuuaaauacaaguuuuauuugacccuagguauucacgacaucgguucauuccguucaauuucacaaguugaaaaaaaaauuuggacuggaaauuugaaauacaauaaauguucaaaagcugucagccaaaagugugcauaagacaugcaaaacacaaagggcaacgugaugauaacucguuuguuacuuucuaacuccuucucaagcacuaugcagcaugcuguguuugguaguguugcguagaagcacaugcuuugaaagagugacaaaaaacccaaaacaaaaugacugccugguugacacucggacacagcgauugcgguucuaugcugccaaggaggauaaagugagaguuucugaagauacucuagcucacuucccgcuuacaaucaucaucaugcccaaccucgccgccauccacaguuauauacucuuacaaaguagaaaaugucucauacuagaaauacaaaaaccagaaucaacagaagguugguuuugacuucacaaugccaaacugguggugaggaauugccgugaccuugagauauuuguggucucacuaugugccaagcugaccaaggagucagcuucguaauaucuacccagaauuuuuguuuugaugacuccaguuuuaaaaaagagaagcauaucaacaauaauugacaaaagcauuauuaacaauaauugauaaaguuauuucuacacaaaaggaaaauagacucauuuguuauggaaagucaauauuacauauaaaaaauaaacgacuggauuuaauaauauucuaaaagaucaaaguugaaguauaaucuaacaaccuuauauacguagcauuauucauuaaaggccugacacuauuacugauguuauggugugcugcuuguaggcaggagccuagcauggcuguccucugagccccuaacaacagcugacagagacagaugccaauauuuacacucaaccauuggacugaagucuggauaccugugguugaauuaggggaaggauugaagaaguugaaggggaggguaacuccauaggaagaccagcagucccaacuaacccagaccccagggagcuuccagagacugagcuaccaagcaggaacauacacaggcugggcagaagcagaggacugccuggccuggucucagugggagaagauguguauaauccuugaggaacuugaagcccuggggaagagggaggccuagugagggagggagcauccucucagaggcaagggggaggaggaaugagaugagaaacuauaggagggggacagggaggagagguaauggcuggauuguuaaaaaaugcgaaagaaaaagaaacauaaaaaaaccauaaaaaguugaaaaaugugaauuuaaauuuagcucauguauuuuuauauaaaauguauaaaaacaauguuuuccuugacaacugaaauugcuauucugaaacgaaagugcucuuuuaauuggaaaagcauuuaaguuuugcauaauugggagaaaauuuaugauacauuuuuaauacaaaugugauuucuugugugagaaucaaagcuccuuugugcuuacuuggaucuacugaagagaaguuuucauaugugcuagagaaauuaaaaauuggacagguuucuuacaguauaguauaauaaaauuuauaauagguuuuuauggggggacacaggcugaaagcccucuauguggugcagagaggagccuguuuguuggagccuugguuuguaagugucaggacaaugagcacucuuugccuuauacauuucaucugauugguuuaaagagcguaaauuuuggaucuuaauaaaaaaauaauuuucacacggcacaucuucuauaaaugauuguauaaugcuuugaaauaaucaucauaacaaugagccaauaaaugcaaaaaucugauacguguugaauuauggagaggggaauaaugcuuugcucaaaagagcaacauaaaacucuguguaacugagaaccgagguuuaaguuaagguugacgagccauguauggcaaugaauaaaaauacauguucuuuuuccuuaucagcuguauugucauaagauguguauguauuuauaguaauuaaauuagugucuuacuuauucaaugucauuaauuuaguuacaguugaggcaguauuauuauacuccagucaaugguuaauaucugcccuuggauauauucaaauaaugagaauuuuggcauuguaaagacaaaacauuuaacaauucuucauuuuuuccuuuguauucauacacauuugugauucacauuacuuuccauaggaucccuuaaguacugaugggcugucauagaggagaacgauaugaaacaaaauuaucucuagguaauuauuacaugacucaacuuaguucuuuaagagaguaucugccccucccccuuuguauuaggaauuauaaggaaacucccaagaucgauuaugaacuaaggucauuuuaauuagcaaagcagauaaaugauauuaaaucauuuucaaagaggccgauuuucucuugcauaucaccaagaaguaaauaugcaacagagaaaaggguaaaguagcaaguuugcaaaggguugccauuccuuuugcaugcacguguuuuucguuaguuaaguugaacucagccuagcuuugacaauauacaacgcugcagaguuuuccuuuuucuuacccucaucccuucaaaucgugauaaggcucuuaggggucucagagcucuuaguguccuuagggauuugauggccccgaguucagaguaacccaaggcauuugcuguuaaacugaccaaugaaaccuguacaauacaaauaacaaugaaucaauaacaccgcuuucguccaauuugcaguuaucaacuaauacaacagauaaaguuuuauucauagcuguucuguuauucuacugaauaaacacagcaauagugacuccuaaugaugaacggcuuuauccauagaucacugccccaccuaacccucgccagagaagcucucucuugcaguaggugaugguuaacagggacccacaacuggacagugcugagugagaguccuuggaaagcucaguacuaaauaggauaucuucaugaaaccccuccucucacuccuuagagagcuauguggaagaggaggcuaaagaguuuaagagcacuuguuggcauccacaauaaugucuggguuugguagcuguauaugggauggauccccagguggagcagucucugggaugucaacaagugcuugcugacaggagccugauauagcugucuccugagaggcucugccagugccugacaaauacagagguggaugcucucagccaaccauugggcugaacacagggucccuagugaaggaguuagagaaaggacccaagcuguugaagggguuugcagcacccuaggaggaacaacaauaugagccaaccaggacccccagagcucccagggacuaaaccacuaaccaaagagaacacaugguggggacucauggcuccagcugcauauguagcagaggauggccuugugggacgcuguuccuaugaagcuucuauaccccaguguaggggaaugccagggcuaggaagcuggaguggguggguugguaagcauggggaguugggaagggauaagggguuuucagaggggaaacaaaaaaaaaggggauaacauuugaaauguaaauaaaauaacuaauaaaauuuuuuuuuaaaaaaguuuaagagcuagagguggggagugacuccaagaaaauuagugucuuccagauacaacagggugagggacauaugagcucacaauggugacagacuugacggacaagacuuguggaaaauuuaaacuggacuaaauuguagcgugggggaggggaggugagcaggaaguuuuuaccccuaaccaagaugcuauuugauaaugcugggagagaaaaaucaguuuuccucaagggagugacacuggguauaugaaccacacucagggcagucugcaagagcagaaguagcuggucuacccaaauguucucgaauuugauuuuuguuugugugcucuuauuuuguuguuauuaugguuuagugguugguuguuuucguuuuuuuuuuuuuuguuguuguaguuuuuuguuuguuuuugcuuguguuuuauugcuuauuuuuuuauuuucuuuuuucuucccuuuccuuuccuuuccuuuccuuuccuuuccuuuccuuuccuuuccuuuccuuuccuuuccuuuccuuuccuuuccuuuccuuuccuuuccuuuccuuuccuuccuuccucucucucuuccuuccuuccuuccuucguucuuccuuucugucugucugucuuucuuuuucuuuauuucucuuuuuuccuuccuuccuuccuuccuuccuuccuucuuucugucuuucugucugucuuccuuccuucuuucuuuucuuucucucuuucuuucucucucucucucucccucccucucucucucucucucucucucucuuucuuucucuuucuuccuuuucuuuuuauaaagagaauggaguugucaggauaucaagacaggaggaucugggaggacuugggggaagguaagcaauauaaugcaaaauacaccguagaaaaauuuacacuguaugaaaaguuuaaaaguaauaaaauauuaaaaggacauaaaugaauaucaagaguaaagaauuugcaaaauaccaaguccuaaccccacuuggaguuaugaaagcauaagcuaaugccuauugauuaauuuccucucucuuuucuguaaaacugaugacuccuuugagauuuccaucaauuugcucacuccauuuuggccucacugaguggcccuguuacuuguuuuuaaguauucauaacuaaaauucuccauaacucacuauucucaaauucucacuauucauaacuaaaauucuccauaacucacuauucucaaauucucacuauucauaacuaaaauucuccauaaggauauuugguacaucaaggacucuguaaaucucauuuacauaaaagaaaauuucuuccucaucauuaaguagguuuguuuuccccuacccucuguaaccuuacuuguaauagacuuaaaaaucucuccguaaaaucuuccaguagauaagaaagauuuauaagauuacaauagugcucaccaucccuucuguaucuugcuauuauuuaccacuggggaagaacaucaaugaauaagugcaugaagacccaaucuggagucggucaaguuuauaacauggcagaauagacaccauaccuuuuaaaugucuuuuucuaucauuugcauuauauauuaccaauaucauuguuuaaauuugguuuuccuacuagaucuuaucuccucuuuuuaaauuaguuaguaaauuaguccagaacuuguaaguucuaugcuauuauuaggugagagaguuuagggcuggggagccuaucuugucaucacaacacaguggcccgagacucauucauugguuuagaauugggauacaaacaagacaaacucccucaaacaaaaggcacgacauggaaaauaccuacaucaacaauuaagaagucuagccaacaccaggcauuggugaaguauguuugauagccauaggccacccauuugaggagcaucuccaggaugaaaauguaagugaagacuuugucagcauacuccagcaugguuuugaucgucuuucgcugaucaauauauauauccucaaaggccuagaaagaaaagguuacacauuuuagcuuucaaacacuacuagaaucuuacagcuagcuuuuucugauuauauaugcacaugguauuuccuugggauggaagaacggggauacaguauugcuauugcuuuguuacucucugaguuuuauccuuauaaaccagagagaaagauauacuuuagauagcuacuaaaaccagagaggggggaggugucuucaugacuucacucuuccugaagugaaaugguaauuuccugagucaauuggcuaagccaggauguauuucuuaaugucacauuccaugcagccauggcgugucucucucucucucucucucucucucucucucucucucucucucucucucucuuuguuauuggauauuuucuuuauuuacaucucaaauguuauccccuuucccaguuccccacucuuggaaagccccuaucccaucccccaucccccugcauuuguaaggcuuugacaggccucauaggagagagcuauaucaggcuucuuucagcaagcauuucuuggcauucacaauagugucuggguuuggugacuguauaugggaugaauucccagguaggacagacucuggauggccuuuccuucagucucugcucuauacuuugucuccauauuuguuccuaugaguauuuuguuccccuuucuaagaaggaccaaagcacccacacuuuggucuuccuucuuuaguuucauguggucugugaauuguaucuuggguauuuggagcuuuugggcuaauauccacuucucagugagugcauaccauguguguucuuuugugauuggguuaacucacucaggaugauauuuucuaguuucauccauuugccuaagaauuucauaauuucauugucuuaauagcugacuccauuguguaaauguaccacguuuucuguauccauuccacuuuuugaccuuagccauucugacugguaugagguagaaucucagggcuguuuugauuugcauuucucuuaugauuaaggauguugaacacuuuuauaggugcuucucagccauucuauauuccucaguugacaauucuuucuuuagcucuguacccuguuucuuuguuucuaugcugugggugugacucaguggcuagaacaguugucuacgugagaccaguagcuugacuuccagcaaaaaccaaauuucucucauuauuauguuuuuuuuauaggagagagauuaaaucaauaagugauuuaucaauauacuguccaauuuuauuuuacuaagcaguuaacugcuuuuuugggguuuuguugauaauucuacuucuuuacuuuuucuuucuuuucuuuuguuuguuuguuuuguuuguuuguuuguuuguuguuuguuuuacaagacaggguuacucuguauaauagcccuggcuauccucacuuuguagaguaggcuggggcucuaacucacaaacaucugucuaccucuuccugauggaauuaagggugugcaccaccacaucuagcugauaauuuuacuuuuugguacguauaguaugacauuacuuaauaggaaugucauauuacuuuucaauuagauccaccuaugccuuuuccuaacauaaaccucagcugguaauuuacuucuaauauauauuucuuucaaugaugaaaagucauuuuugucuaugauaugcagauauguagauaaugauauguagaagacaguuauuccaucaacaauuuuauagaaaaauauauacuugauuuuaaaacuuguaagucauuguguuuuaaucaggcaaacacuugugcuuauuuauuuauguauauauucuaucauuuaucuaaaucuauauaucaucuaucuaucuaucuaucuaucuaucuaucuaucuaucuaucuaucuaucuauaguuucucuauuaucaaucucuccaaacauuuuauuuuaugacuucaauauauuuuuauaucuaaaauucugucaauauaguuguauauauguaaacaauuuucaucuaaauuuaaauagauucugaugaaauuaacauguuucuauaaacauaauccagucuuuaaguaaucacuuagguauggugcccacuacuuagcauuaccaauaucauuuguuuccugaguagcccaagaauagugaacacacaugaaaagggacagagaagagguccccaacgaccuaccaagcuuccacaaagaguucaucagaacucagaggauauauaaccacuauaauagcacuaacaugaacucugaugugcuccucauagucauguuuaguuaagcaaagaggaauauucacuuuguuuauaaugacuaagcaaaagggacccguuuuuuuugaucuguuucaugauaagcaaacaucgaugaaugauuagaaaugugugugcacacauagaugcaaacccagaaaugcagcuagucauuaacuaucuggcaggaagauaaaaggguguuguuauugaagacucauugauaacuaaggcaaugggaaacaaaggcuuaaagagugugagauuuucccaguugcuacugaagcacuuuggguuaagguucacucaccagggcaccacuacucaggagaaucaugaacacaaugaaggucucaaaccaguuguguucaacuauucggaagcacguccuccguagguuccaccacuguuucccucuuccuucuuccacgcugauuugacagcacuugaaucucuggacacagccugcaagcauacgguuccaauaggaguaugaaagauagcucuaccaccuccauuauacauugcaucagcccagcuucaucccuccaccaccagcgcuauuccuaauuugcuuuaacuuuuaaaaaguguguaauuuauaagcaauggcaaaucaaugaaaacauacagcaucuucauauuuugccuuuucucugacacaauguugccuucaaagaaaacucauuguaaauuacaaauaacgacauguaguuugccuuuugugguuguucuuuucucaucucucucuuuuuuuuuauuuuaauuuuaaaaauuucuuuaauccuuuuuuauaguccaguauuuaucccacuccuggucuggccccuuacugcuccucaucccauauuucccuacccuaguauguaagaggaugugcccacccacaccccaccagaccuccccacucccugggaccucaaaucucucaaggguuaggugcauuuucucucacugaagcuagaccaggaaguccucugcuguauauguguugggggucucaucagcugguguauacugccuguugguggcucagugucugaggcaucuugggaguccaggucaguugagagugcuggucuuccauggggccaaccuccuccucagcuucuuccugcuuuucucuaauucaaccacgggagucccuggcuucugugcacugguugggugcuaguaucugcaucugacuuuuuauggucugaaauuaaugcauuugguuggagcuacucuagaaaaggguuucaaaaugaaauuaauaccuggacagaaaccuccucuccuaaguguguauucuuguggugcuccugaaaggguguuccugguuuccuaaguugucugaguuugcuaacaggugacuuuccuggacuugcuuugaugugucuuuuacguccucacauugcuuuuauauacugaaucuagccugugggccucacucucuacaaggucuauuacauuuaagccacccacuuugggugaucgacaguugaaaaggccguacuccguaugaacugcaagcgaugucacccgcaucuuuaccuucagugaagcaagcuucgggcucaaggguuucuucugguucaaugacaggcuguuccucugcaggcgccccaaugucuacugugcuucccucugaggagcuacugcuuucguugaguuucugggcauaaaaugaucauaaaaagcaaauucuuuuaauuuaauuccccaaugaaugacauaccaagaagggauuauuuuucucaagguaaggugcuaauguaaauugagaguaaaacgaagacucagaagaagagggaaugggaaaaccuaacuguugauuccuaccccaggaauuucugugugcagauugcugcgcugugcugggaugucacaaauugaccaucagcaacauguagugagggaacuccuaucccauggauuggggaaggagagagugucgugacuuguaggaauggggagagagauaagggaaaugaagcucggagaaucucuaccugagaagaaaauaaaaccauuaagcuagucuguguuuaaacauuuacauauguuucucuaauagugucucaauucugagaaauuauaacauaaugcuuuaacuuacacuuccuguuagaacagaggaucagaauuauuuauuauaaauguauucauauuuuuauauuucauaugccuuuuggagaaaagguguuuuacaauaaguuaaaaauacaucaauaaacaaauagccuuagacucuuaauuaaagggguucauuauuggaaaauauuuucgaaccuaaaguguugcagaaacagaccaauaaaugcauggaaaagucaguuuccgcucaacaaguaacacacuaauaucccacguaaagcuaauucaacagaaacagcguuucucagacuuuggcaguagucaccagacacauggugcucuuuggauccuuaggagucaaagauggcaaaaacagcagaaaauaucaacuuauccugcugaccuucaaauuguuguaagaguaaauaguacacuuggcaauuuagucaaguuaagauacacugagcgccaacaaugugcuagaaacuugguguucauuggcaacuauaaaauccguagcccuauuagauacuugaaauaaaauacgauguuuuucaaacgauggauuuauguuuaaucuaaaagagaucucaccaacuacccagucaacacauauuuuuaaauaauaaacuuuaagcaucaugcuaaaacuacuacuacuaauucguauacaugaaacaguuuucuuuguuccaucaaaggaagauggcuucuacaccugggccucuauccagcugacugucucucuuccuuuuaaauuucuuguuaaauagaaaauuaaaggucacaaggaucugcauugacaugaaagaccagucaugguucugagugucuguuuuaaagauuaccucuguuauuauacauagauucuucacuggaagcuaguuuuaaguuuuuaaauaauuaugacuauagcacguuuacauauucaucaucuggagaauuugcuccucugcacaggauacagcaacagguagacuuuaaaucuacacugcauuugcuuugaaugauucaaccauuucuucugacuuaaaaacauauccaaggauaagucaugcauuuggccauauaauaagugaagagacuauaauaaauggcuagucugugugcuugaguuacagugcccauucugaggauuccugugucuuuccucaacauaacuggaaucuauaauuggcuguaaugugcuacaagaauuauuucuuauuuccuaaaaaaaacccugugaguagaauuuuaucauuauccagcauucuucuucuucuccuccuccuccuccuccuccuccuccuccuccuucuucuucuucuucuucuucuucuucuccuucuccuccuccuccuccuccuccuccuucucucucucuauauauaugucugucuguguguauucucuuuguauaauaaguaaauugauuugagaaguuaagaguccuuaccaaaauucauuaauuacuagaaaucccaucuuccucccucugaauaaacuuaugugugggcagggauucagauaaacuuuauuguaaauagaaauuuuaacuugcugagcauguaacagugaucuguuagaucucuacagauauuuugcucucugucaagaaucacaauaucagguaccauucagauaaaaccuaaucuucagugauaucauuuuucagugucaaguagaacaaaacgcucucaagcagccuuucuacaacaauggcauuugcuaguaagauacugcauauagcugguucuacgucuugccagccauaucauguuuuucacaaugaccacuguuuucauugacgugugaaguacugacuucuuauucuacguuuaaaagauuacuuaguugauggaacuaaauacuauuuuucuuguucuaagaaaaaggagucugaacaggugagagggugcgccacagaaccggauagcuucugggacaggcggaggcacagagccacugaggcagcauccuuugcgggcagcagacagccggccaccgucuggacaagaggacagguguccgccuggcucagaaggcagccucagccuaaggagcagcugucgccaucuugguuccgggacuccgcagaaccuaggaaauuagucugaacaggugagagggugcgccacaaaaccggacagcuucugggacagguggaggcacagagccacugaggcagcacccuuugcaggccgcagacagccggccaccguccggaccagaggacagguguccgccuggcucggaaggcggccucagccucaggagcaguggucgccaucuugguuccaggacucugcagaacuuaggaaauuagucugcacaggugagagucugcaccacagaagcugacagcuucugggaccugccaaagcaacacagcuucugagaaagguccuguuuugggccuucuucuucggccaggaggagguccaaacacaagauaucugcgcaccuucccuguaagagagcuugccagcagagagugcucugagcacuaaaacucagaggagagaaucugucucccaggucugcucauagacaguaacagaaucaccagaagaacaaucucuaaacagagucaacuauaacuacuaacuccagagauuaccagauggcgaaagguaaacguaggaaucuuacuaacaggacccaagaccacucaccaucaucagaacccagcacucccacuucgcccaguccagggcaccccaacacacccgaaaaccuagacccagauuuaaaagcauaucucaugaugaugguagaggacaucaagaaggacuuuaauaacucacuuaaagaaauacaggagaacacugcuaaagaguuacaaguccuuaaagaaaaacaggaaaacacaaucaaacagguagaagucuuuacagaaaaagaggaaaaaacauacaaacaggugauggaaaugaacaaaaccauacuagaccuaaaaagggaaguagacacaauaaagaaacucaaagugaggcaacacuggagauagaaacccuaggaaagaaaucuggaaccauagauuugagcaucagcaacagaauacaagagauggaagagagaaucucaggugcagaagauuccauagagaacaucggcacaacaaucaaagaaaaugguaaaugcaaaaagauccuaacucaaaauacccaggaaauccaggacacaaugagaagaccaaaccuacggauaauaggaguggaugagaaugaagauuuucaacucaaaggaccagcaaacaucuucaacaaaauuauugaagaaaacuucccaaaccuaaagaaagagaugcccaugaacauacaagaagccuacagaacuccaaacagacuggaccagagaagaaauuccuccugacacauaauaaucagaacaucaaauucacuaaauaaagauagaauacuaaaagcaguaagggaaaaaagucaaguaacauauauaaaggcaagccuaucagaauuacaccagauuuuucaccagagacuaugaaagccagaagagccuggacagauguuauacagacacuaagaaaacacaaauuccagcccaggcuacuauacccagccaaacucucaauuaccauagauggagaaaccaaaguauuccacgacaaaaccaaauucacacauuaucucuccacgaauccagcccuucaaaggauaauaacaggaaaaaaaaaaaaaaccaauacaagaacgggaacaaugcccuagaaaaaacaagacgauaaucccucaacaaaccuaaaagaagacagccacaagaacagaaugccaacuuuaacaacaaaaauaacaggaagcaacaauuacuuuuccuuaauaucucuuaauaucaauggucucaacucuccaauaaaaagacacagacuaaaaaacuggcuacacaaacaagacccaacauuuugcugcuuacaggaaacucaucucagagaaaaagauagacacuaccucagaaugaaaggcuggaaaacaauuuuccaagcaaaugguaugaagaaacaagcuggaguagccauccuaauaucugauaagauugacuucuaacccaaagucaacaaaaaagacaaggaggggcacuucauucucaucaaagguaaaauccuccaagaggaaaucucaauucugaauaucuaugcuccaaauacaagggcagccacauucauuaaagaaacuuuaguaaagcucaaagcacacauugcaccucacacaauaauagugggagacuucaacacaccacuuucaccaauggacagaucauggaaacagaaacuaaacagggacacaagugaaacuaacagaagugaugaaacaaauggaucugacagauaucuacagaacauuuuauccuaaaacaaaaggauauaccuucuucucaguaccucaugguaccuucuccaaaauugaccacauaauaggucacaaaacaggccucaacagaugcaaacauauugaaauugucccauguauccuaucagaucaccaugcacuaaggcugaucuucaauaacaaaauaaauaauagaaagccaacauucacguggaaacugaacaacacacuucucaaugauaccuuggucaaggaaggaauaaagaaagaaauuagggacuucuuagaguucaaugaaaaugaagccacuucauacccaaacuuaugggacacaaugaaagcauuccuaagaggaaaacucauagcucugagugccuccaaaaagaaacuagagagagcauacauuagcagcuugacaacacaccuaaaagcucuagaacaaaaggaagcacauucacccaagaggaguagaaggcaggaaauaaucaaacucaggggcgaaaucaaccaaguggaaacaagaagaacuauucagagaaucaaccaaucgaggagcugguucuuugagaaacucaacaagauagacaaacccuuagccagacucacuagaggguacagggaaagcauucuaauuaacaaaaucagaaaugaaaagggagacauaacaacagauccugaagaaauccaaaacaccaucagauccuucuacaaaaggcuauacucaacaaaacuggagaaccuggaugaaauggagaaguuucuagacagauaccagguaccaaaguugaaucaagaucagguuaaugaucuaaacagcccgauaucccccaaagaaauagaagcagucauuaauagucucccaaccaaaaaaagcccaggaccagauggguuuagugcagaguucuaucagaccuucaaagaagaucuaaucccaguucuucacaaacuauuccacaaaauagaaacagaagguacucuacccaacucauucuaugaagccgcaauuacucugauaccuaaaccacaaaaagaucccacaaagauagagaacuucagaccaauaucccuuaugaauauugaugcaaaaauccucaauaaaguucuugcuaaucgaauccaagaacacaucaaaacaaucauccauccugaccaaguagguuucaucccagggauggagggaugguucaauauacagaaauccaucaacguaauccaguauauaaacaaacucaaagacaaaaaccacaugaucaucucguuagaugccgagaaagcauuugacaaaauccaacacccauucaugauaaaagucuuggaaagaucaggaauucaaggcccauaccuaaacaugauaaaagcaaucuacagcaaucccacuaaaaucagggacuagacaaggcugucuacucucucccuaccuauucaacauuguacuugaaguccuagccagagcaauuagacaacaaaaggagaucaaggggauacaaauuggaaaggaagaagucaaaauaucacuuuuugcagaugauaugauaguauuuauaagugacccuaaaaauuccaccagagaacuccuaagccugauaaacagcuucagugaaguagcuggauauaaaauuaacucaaacaagucaauggccuuucucuacacaaaggacaaacuggcugagaaagaaauuagggaaacaacacccuucucaauagccacaaauaauauaaaauaccuaggcgugacucuaacuaaggaagugaaagaucucuaugacaagaacuucaagucucugaagaaagaaauuaaagaagaucucagaagauggaaagaucucccaugcucaugcaucggcaggaucaauauaguaaaaauggcuaucuugccaaaagcaaucuacagauucaaugcaauccccaucaaaauuccaacucaauucuucaacgaauuaaaaagggcaaucggcagauccaucuggaauaacaaaaaaccuaggauagcaaaaacucuucucaaggauaaaagaaccucugguggaaucaccaugccugaccuaaagcuuuauuacagcgcaauugugaucaaaacugcaugguacugguauagagacagacaaguagaccaauggaacagaauugaagacccagagaugaacccacacaccuauggucacuugaucuuugacaagggagcuaaaaccauccaguggaaaaaagacaguauuuucaacaaauggugcuggcacaacuggcuguuaucauguagaagauuucgaauugauccaguacuaucuccuuguacuaaggucaaaucuaaguggauuaaggaucuccacauaaaaccagagacacugaaacuuauagaggagaaaguagggaaaagccucgaagauauggguacaggggaaaaaauccugaauagaacagcaauggcuugugcuguaagaucgagaaucgauaaaugggaccucauaaaauugcaaagcuucugcaaggcaaaagacaccgucaauaagacaaaaagaccaccaacagauugggaaaggaucuuuaccuaucccaaaucggacagggguucuaauauccaauauauauaaagaacucaagaagguagacuccauaaaaucaaauaaccccauuaaaaaauggggcucagaacugaacaaagauuucucacccgaggaauaccgaauggcagagaagcaccugaaaaaauguucaacaucuuuaaucaucagggaaauacaaaucaaaacaacccugagauuccaccucacaccagucagaauggcuaagaugaaaaauucaggugacagcagaugcuggcaaggauguggagaaagaggaacacuccuccauuguuggugggauugcaggcuuguacaaccacucuggaaaucagucuggcgguuccucagaaaauuggacauaguaauaccggaagauccagcaauaccucuucugggcauauauccagaagaugccccaaccgauaagaaggacacaugcuccacuauguucauagcagccuuauuuauaauagccagaagcuggaaagaacccagaugccccucaacagaggaauggauacaaaaaaugugguacauuuacacaauggaguacuacucagcuauuaaaaagaaugaauuuaugaaauuccuagccaaauagauggaccuggagggaaucaucuugagugagguaacccaaucacaaaggaacucucacaauauguacucacugauaaguggauauuagcccagaaacuuaggauacccaagauauaagauauaauuugcuaaaaacauuaaacucaagagaaugaagaccaaaguguggacacuuugccuucuuagaauaggaaacaaaacacccauggaaggaguuacagagacaaaguuuggaagugugaugaaaggauggaccaucuagugauugccauauccagagauccaucccaugaucagcuuccaaaugcugacaccauugcauacacuagcaagauuuugcugaaaggacccagauauagcugucucuugugagacuaugccauggccuagcaaacacagaaguggaugcucacagucagcuauugaauggaccacagggcccccaauggaggaacuagagaaagcacccaaggaacuaaagggaauugcaacccuauagguggaacaacaauaugaacuaagcaguaccccggagcucuugucucuagcugcauauguaucaaaagauggccuagucggccaucacugcaaagagaggcccauuggacuugcaaacuuuauaugccccaguacaggggaaugccagggccaaaaagggggaguggguggguaggggaguggggggguauggggacuuuugguauagcauuggaaauguaaaugagcuaaauaccuaauaaaaaauggaaaaaaagaaaaaggcuuaucugagaaaugccuggaaugaaaauugcaagaacccaaaaggcacuauguuaucuuuugacacauuuucaaaauaucauuuuauguagaaggcaaauagauaugcacuucaaaaaauucauuuagacuguauuuacauucauauuucacauguugacuuuuuuaggcuaccuacauaaaauuuucacucuuccaaagucuuuguaaagaauauaugcagacugacaguuuuuccuuguuauuuuuauauuggcaucuuaauucauaaagauagucugaggcuuacauuauuucuauucaaacuuuauucuuuugaguugucgaaauauuucuuucuagugaggauauaaugggacaguaagacaaaaaaauaaaaagacaacaaacacugguguguacaaacucaaccaccuuuacuggaauuuugguuacauaaaggccuaaucuccuuauuuuuaaaugcaauucugucuucugacuuauauuuuaccuucaguuuaacugaccugaggucagauagccauauacaauaucugcuaucuugauuuucuaagcuuuacuuugaguuccgauauacuguuccuuuuuguaaacaucuauggauacuuguggauaauacuaacauuaaaaauacuaguaaugggcuacagaugguucagcgguuaagagcucugacuucucuuccagauguccugaguucaauuccccgcauccacauggcagcucucaaccaucuaaaacuccaguuccagagguucugacgcccucaucugaucuugugggaagaagauauguaaguaguacacagauagacauaaaagcaaauacucaugugugugcauguguguuuguguguguuugcaagucuuauuauaugaaauaaaauaaaggagucucaaugucgucauuuaauuuguuacauuuuaaucaugagauaaaacauugcuucagaacucuaaaagcaaagguaugcuuauuauuauuuaucucauuguuaaaacaaaaaguaagugcaguucuuugguuaaguuaucacugcuacucaaauagggaggaagcucaauagcucugagggaggggcucaccucaacuuugcacacagacauguuucauacaauauucuaaagauccuagguaacaaugcaacccaguguugucaaacaaguauuuuauuauuuuaaaacuuaaugaaguagacuaguuccuuuuuauucuuaaguugguauuaauuuuugcuuuuuaaaguauguuucuuaguguuuugaaauuaauaaaauauguuaaauccauuuuagcauuuaauaugcuauuaaucaaucuucaauuuauuaauucccuaauggacuaguuaauuagaggcuggguauauuuuuccauauaaaccgucugaucugugcaauccauauguacuuggcagguuauuuaugaggugagaugaucaguuacuaacugcgacccugaugguaagagcauuuucccuucaccguggauucaugcucccuuuuuuuuccuuuuuuuuuuuuuuuugcuuuuaaagauguucucugguagagaaaaugaccuugaaaaugaaacaaaacaaaacagcaacagaacaagccacagcuugggguuucuuuggaaggaaccagucaggugucucuuucuucucagcuuuaacuuuaaacgugagaugucuuuauuuugugaccuaguuuauuacagggauauuauuaauguauauuaaugaaaguuuacuuuuuauuuuuaagauuuauuauuauaucuaaguacacuguagcugucuucagacacaccagaagagggcgucagaucucauuacggauggcugugagccaccaugugguugcugggguuugaacucaggaccuuuggaagagcagucagugcucuuacccccugagcccgaaaguuuacuuuuuaauaagugauaaaaauaauugggauuuuguaacugaugggucauauagugcacugucauauguacagagagagagaugcaacaaagacuagcacggaaggaacuuaucuauaaaugaagcccauacucaucuaugaacaaagcaugacguguuuuuaaccuuagccuuucgcugacuugauacuuuuauacaaaaauauauaaaugagauuccugaugcucuguuuaucaguuauuauugucucaaaggguuaaaauacuuggcaaagcaguuuaaauggaagaacguuuucuuuuggcucauaguuucugagcaggcagugcaugaugguggggagagagcauguugguuuagagcagugcaugucauggugagcaagaaaaccaagaaagggaaagcagccucugcugguagucaucauugucgucaucuucgucuucuuccuccucuuccucuucuuucucccccucuuccuccucccccuccuccucuuccuccucuuccuccucuuccuuuuccuccuccuccuccaccuccuucuccuccuccuacuccugcuccuccuccuccucuuccuucuucuucuucuucuucuucuucuucuucuucuucuucuucuucuucuucuucuucuucuucuucuucuucuucuucuucuucuucuccuucuucauuucuucuucccccucuccuuuuauuauucagucugugcucccagucccugggugggugucauuuccauuuaaacauaguuuucuucuuaguuaacccuuuauauaaacucccuaauagauguacuuuggggugcaccuuacaguuuucuaggugguucuacauuuagccaaguagacaaugcagauuagccaucauacuccauagcauuaaauauaugaauguuaauauguuguuguguauauucugccuuaggagauauuucuaauguaugcauuaaaaucaaaaugaucacuauuaaugacucucaacaaagcaacacugucauaucaaagaaaaagacacuauugagacaguaguucuuauaaagcagcagggaagcucaaacaccagcccuuagugccccauaucaucaguuucccuaaugucggucucuacuacccuaacuucucaauauaaagacaggugguauucuccauacacccuguuuggguacuagcacaauaggcaaauugcauugacacaaucuauucuaauauacuaaaauuuaaaaaaaaugggguaacauauuggcuuuuaaacucuaacugggcgauggcuuguaauuuagaaacauuacaucucuaauguuuauacuauuguaauauccaugauuuuuaaaucagcagauuucugagcuacaagagcaugggaaaagaauggcuaugggcucuagggguucuguggacaaucagugaugaagaugucagugcucuuucuauuccugauuaaugcaaacagaagcuguacaaaugcgaaucauguuaauuuucaguggaaagauaauuuuauggauacuuuuuacaauacaauugcuuaucaguaauauucaguacauaauaaguagcugcuacuauuauucagccaauauuaaauguacgccuauagauucaaggacuuaagaugaggagauucaaacuagaacgaauuuuggaaauuuaucuugucagaaauuuagaaugauguguuuaaauaagauguuuuguugauauuuuuacuuuuagaugugaucuuauauguuucaggcuucccugaagcucacuaucuagcugagacguugaguuccugaucuuucugacuuuaccugcccaaugaugggcuuuuagucauuagguaccaugcucaacaaacauuuauuucacaguugacaucuaccauuuauuuccuagaaaacaccagguacuaaguaaacauuuuaaauaagacaauguucacauaguaguccuuaagacauucaguaaguuaaaaaaaaaaguccaucuuccucccacacuaaauccaucucauuggaguuaguaguuuccccacugucucacuucuguguuauuuugcuuucucuucuuucacgagaagaccccaaaauaucucaaugcagccacugcuaguuuuaauaucaguuccuacuucuaaaagugggaauuccaauaugacaccaaaguuuuuauaaaagcuugaaucaucauuaaauagacauauucaacaaccuaauaucaugucaugugucuaugcuuucugcucuaggaacuaccaaccaaaacacaccauuguuucccuugcuuaugguugauauaccagucgauuuuuaauaggaauagaguaucuuugaauagagugucuuuaaaguauuuagauuacucaagcucuaaauaugcuuuguuaucuuugagacuuccaugcaauagcauuauaucacagaaaucccacuguaagaugaaaauguaguuagagaaaaaaaaaccauucaggacacacaaaccacugaacaccauagcuagcaauauacacaggaauguguugguuguucagaaauaguaacgguaaguuagcccaaguuagagacaguccuaauauccacaaauguuuuagcuuuaauauuuucaaguaggaccucauggacugaauuacauuccccuacccauucuucuauccuaaauucaauugcugaaacugagagucucuaaauaucugaaggucuggcuugauaaugagcucuacuuaucuaaugacuccaagauucucauccaauagaguaauucccuuacaaguugaggaagagacaagagauccauuucuguucagugcaccuaucagucaggccuuguaaagacauagugagaagguggacaucuacaaccuuagcaaauaguccuccccagacacugacccugcaguaccauggucuugaaaugucugcuuuccagauugugaauaaauuuuuuuuuuuguguguguguaagccaucuauuucuuagcaccaugcuauuuuaugacauuauguaauuuuaaugugacaauugguagggagcacuuuuuuucugaaguucacucaguuauuuaaacugagaugacacacacaaaaauauuaaaacuuaaagacaaaggcuucagguucaaagugggguuccaccccucacagguuacaugcucuuagccagccaaagcugguuguuuuuuucuuuuguuuuguuuuguuuuguuuuuucacuugaaacuuuacaguaauauguuccuuucuguucauuacaaggauuaaguaacuaaugaugcuaguuuuuaauucauuauuuguacccauuuaacaaacagauuuuaagaaugagaaaacucauacaacaguauauuacauuuugcuuuggcauucaucucccugagaaaagauuuuuggaaucucaauaaaauaauauuugauauuauaucaaaaagguucuauagaaucauuaauacagaaaguauaauccauacauauauuuauacauauacaucuccccaauuuacagcaucuuaccucuuugcuuucuucuagaucugauucacugcuaaagucuucuguguuuaaguucucaaagucagacucucccacagcaaugggcacagucacagugaggcugggguuguuuaugaaugacauauaaucacucucaucaaugauguacuucuccacacugcugcccgucccuaugccacuugugguuccauucacaucuuucagacaguccagaucuuucccaauuucuguugugugguuagagauacaauugucuuuucuguuguuuagaucaucaaguggcuuaauuucaucuagaaucuucuguuucuuaacaaaggauuguugaaugaauucauauauuuuucuuuuuacauaagcuauuccuuugugcauccuguccacagcaaucugcagguuguucaucucauugucaucaucaguggcugcaagguugucugcacuaaaugagcucagaagcaaggccagaaagagguucaagaccuugaaaacagacauaaguauguguucaccacaacacagaggacauaggauggcuuauuccuuuagcuauagaaugaauaaccgaaugcuauaugagcaagauacagcacaggcauugcuagaaguuaagugggccaagaccagaaaacaugaggcccuggguucaacacuccgcccuagaaaaguuuugagcacucugaauuugugauauugcuccaucucuauguacaugaggcauucuuucuacugcucucaagaucucccauacaugaaaugaagaacuugaaugaauuaguuuaucauuauauuuaauauuauaugaguaaaagaagauauauuuacugagauacuuuaacaauuccaaauuuaaaaaugauuaauauuugcaauuauuuauuuaaauguauuuuggguuuucucucuucaugauuuuguguuguuggaugauaacugaaaaaaaucauagucaugaccaaauuuagaaugaaagucuucaacauaugcauggaccauucuuguuagcacuauucuauagcaaaaauugcccccuuucucccucacaugcacacgcacacauagacaucacacacaaacacacgcacauaacauauuuguguaaauuuuuaacaguccuaugcaauuuaauaacuaaaugcaaugaagugacugaauaaaauagaguugagaagccagguggcacaaucacuuuaauccaaguacuugggauggagaggcagguggaucucugaguucaagcccagcuagaucuacagagcaaguuccaggacagccagggauacagaaagaaaccuugucuuaaaaaaauagagcuguaaaauauggauuugagaguaaaauaucauagguaauauuaaugugcauacauuuguuuuaagauguauuucuauauuaccauaguagauugugauacuauacuuugccauguugcgguauauuuuuagaauaagaagauaaacauaucuuaagaucagaggcauuuaaaauuauuuaucaugaaagucauuuuuuaauaaauugggcacaaauuuguuauguuauugauguauuucugaaaugcauaucuaacuuggguacauaccacaagguucccaaucaccaugaccaucaugaagacaguaaggcacauagcuuguccugccaccuccaugcagucccacauggucucuauccacuccccacacagcacgcggaacacgaucaggaacgaguggaagaagucguucaugugccaacgugggaguuugcagucaguggcaauuuugcagacacaaucuuuguaacuuuuuccaaacagcugcaugccaaccacggcaaaaauaaagacaaugauggccaacaccagagucagguugcccagugcucccaccgaguuaccaaugaucuuaaugagcauauucagugugggccaagacuuugccaacuugaacacucggagcuagaaaaugagaacaaauuaauauacauuauuaugaucuucacaagcauuaauuaucuugagacuuacuaaagaauaaggggcugcagcucagagacagaacaccuccuuagugggcaugcagccaugagauccguugcuagcacuacacaccccuaaaaaauucugcuuacauuaucuugcucuaacuuucucagguucauaguuaauauuuagacccucauaggaagaaucuagcuuuuccagauuuuaauaauguggcucaucuucucugaaagugauuuccuaguugcauauuagaaacuauauucuuuaauuuguuucucugagaccaucuuccaaguuuuauagugucauauugauaucugaaugugaauaauuucugccaaaggauucauuugucaaaaagguucuaaguaacauugcauugagagcauugaugaaaauaaaaugaaaaauauuuauuaucuauuaauauuauaacagaggaaaaauauaaauaaaugcaauguauuguuaaaccuggauuauuugcuaugacucuuccucaaucuucagggaauuuguaugaaucuaucuaucuaucuaucuaucuaucuaucuaucuaucuaucuauccuuaauagaccugcaaacuuuuguuuuuauggaacauauuuuuuagaaguagaauuacaugcauacauuuuaugugaauaucgaagaguuauuuacauuuucaacauuuauuaaguuauuaaccauuucuauuaaacacacuucuucagguugaaaguauuaauuguccaagucauuagaaagaacacauuaucaacacagcaauagaaaaagauaucaguguucacgugacggggcuagugacagcucaaggcucuggguuauguaacccagcacugcaaacuuauaaaugauaauauuagaaaguuuacauaaauaggcuuuucagaagaaaguugccuuuguaaaaaaauauacaaauauuaccugagagauauuauuccccauuuagagguaucagccuacacaaaaacuuaaaaugauaauaguuuuguggaaaaguauagggaagcacuaugagagaacaccacuggggaaaacaguuauuauugcaguugucuuguuuaccagucgaaaugaacggagaacugacaauccuuccacauuggcaaggccaaguucuaccaggcugagugucacaaugaaaccaucaaagauauuccagccuucuuggaaguaauaguaaggauccauugcgaugauuuucaggaacauuucugcugugaaaaucccagugaagaccuaaaagcaaaaccauauuauuuaaauuaucuuagauagugauaacaucaaagauaauauuauauauauauauguauauacauauauauauauauauauauauauauauauauauauauauauauauauauauaaaagacuaaugcuacuucuacuuuuccauuauugauccuaagauuauccuacaaguuuauuugacaaugcugguuuauauuaguuuacuguuuuaugcucauagaagcuccaauaaccagauaguguaaaugcuguaacuauuuuauuacagaugaagagaacaauauuucaagguauauaaaaugcccaucuauuauuaaccaacuuccagaccucaugucaccuagacaagauuuugccccaaaacauuuuauuuguaaguuuaucuuuauucccuucaaaucauguguaucuuauauuauucucaucacuaucauuaauauuagucacaugcacuaaaagugcguuuccagaaucuaaauaguagagauuuaaaaauauaaauccacuauagcauaugcauauuuacauugucuuuaucagcaagauacuaaacauucuccuagauauuauauagaaugcauguuauacuuuagauaguucuuucuucaaauaaaaaccugagacuuuuaaguugagucugcuggaaaauauuuuaacaauuuaugcuucaaaguaaaaaauggagaauauugucgaaacuuucacuaaaaaugggcuuacuaaucauaugauguacaaaaugcacuagguacugucaauauuucaugauaugaaucuagaacagaacuuagacucccuugacccuggaaggaaaaaagauggagacacuuuuguguuaucauucuuugaaagagcauauaaggaagagaacucaugaccuuauuugaaccaucuggagcuaggacagagugaucuuaucauuuaaagaagaacauggccuuagauucugaaagaacaccauuacugacuuuuuaaauuauuauuacaggucuauguucuauuucucaguuuuugcacagacauuaaaggccauuauuuggcaaaagguaguguguacccgucuggauauuauugccuuagggaugcaggaauugugguugaaagaggucuaauaaacuauugaagauaauaaacaguuucuuaagcagaaaauuugaagaccaagcucauuuauuuaccuucuugcacacuuaccaaguuucccacuguaagaacaugguugaaauguucagucaugggguagugcuccauagccaugaagagcguauuuaacacaaugcagaugguaauggccagaucaacaaauggguccaucaccaccagguugacaauauguuuaacuuucagccaauauggagaacagucccaaauuaagaauauguuggaaaauuuauaccaacaggguggacauuucugccuggauucuucuaguucuagauuuaaaaaaaaaauagaagaaacaauaaccaauuauuugaaccaucuagagcuaggacacagugauucuaucauuuaaagaagaucauggccuuagauucugaaagaacaccauuacugacuuacaaauuuacaaauuuauuuuagauccacuaaacaugcucucaguagcaaacauauuucucuuugcugcaaagauaauuacuugauaaaaugguacaguaucauuagucauguacauagagauaggaaagaaaacuuuuuguuuuguuuuugcauagacaguguugcuuaacacuuggccucuauuacagugguugggcauauagacaaagguuccauggaaacauagccuggaacuauucacucuguguaaaauuucuuguuacugauaggcuacacaauuuuaagauuuaggacaaggauuaauguaauauauaaagaaaucauucuuuaugcuuugauuuugugaaagugacuuauucuuuucuccagucuuaaaauuauuucagaucauaauguaaggggccaugcugcugaaguuugaagcacauuacaacaaaggauuugugacuaauggauuagaaaccucuagcuguucccacauacuuauuaagacauuaaaaguucagaaguuuagaacauugaauuuaguauguaauacuuucagaauacaucaccagccauuugcuaguaggacuguuccuuuuacuuuuguucauagaguguacuugccaacacauaaguagagagaguugacuccaacaagauauugcaagauggcugaacugagggagguaggguuuguuaccaaccuucuacuguauuuguuaagaugcuggcuaugcucauugcccuuugccucugggaaggaucuucuagaaaguccauggaaacauggaaagagcucgaccuccucuuucucaucucaguuucagugguuguucccugcaaagcaaaugcuaaggcauuacaugacuagcuugagcaauacagcacagaaauaaauggagacagugauuuucaugaaagacaugcgucaugcgucuucaucuuugauggccaauggcagauacuggugacuuauuggaucauuaaccuggaauauucaaacaguuaaccauguagucauaaaggaaaauauaaaauuuugaccccuccuugauuuuauacucuuaugaaauaggaugcgaucaaaauauaguuaguaaagcuuugcauaggcauuuauagcuuguuuucaauuaaugaacauacugucaaaucuuaaugccuuaaaaucuuauauauggucaggccauuuuucacuuucgagaaaguagcuguuuaauuuuaagaaaauaccgaagaccauaacacacuuagcugucaucucaauuucuaagcauaagacauauacucauuuauuauaaaguauaugcugauccaugcaugugaugcaggggcaacaguuucauccaggauaccaaagcaauaagucaucugauuuacaccgagucaugccucgucaugcugauauauuuccaauuauuuuaucuggauuaauaauuuauuggugucucuguguagauuguuuugugaauaccuauaucagcauuucuuucuuagugagauaaauaugauccuuagaaaauguagguaaugaugaagcuaucuaagcacaguguuuuugaaaaucugaacuaaagcccagauaaacuguaagaguuuagugggaagauuuacuauacacccuuuacacuaaaaagucauucauuuaaucuuacaauaauagggcacuaggggugaugucuucauauguaaauucgguauggguacauagcaaaucauccaaggaaguaauuauuguucaauuaauccuuagcauauacaguagguaaugcauucagguuugugcaaggagugccgaggcgcuaacauuuagcugguuagucuauuaaaggugcuacaagaugcaggugcauucucagcucgaccaaccaggaaucauucucaagaguuccauucuguagaaacacuggcuggugcagcaaucauaggccagccaugccugaacuauguaaaacuuucuuacauugucaucaguagcuggcuuaucuauuaucaccucuggcagaagcuguccaacuggcgaugugggaacugaggguccaccaaccaaggaaaccacaccauugcaauccaccgugcugugcaucuucccauuggcuggaaacaccgccagcauucgggaggaccugcuggucuggcucagguuacuguugcgucgcucuccgugucuucggggaacgaacagugagucucuacggcucucauuauccucaaaggugcuguguucaucaucagcaaagucauucucagaccccacauccuuggcucgcccucuaaagcugaaaagacuuguucugcuauugcgucuuggggagaacagggaaccacgaaugcuuaacagagacugaaaguuugaaacacaugacaaaaaguaaaauuacauuagaacugccuguugaaauaguuuugcaaguuuaaguugaagaauauugcauuguuauuuuagagaggguagcacauuccuucugauuaauauaauuuauuggcauucagaugagauuaaauuaguucuauacaguauggcuuccagccauugauauuaaauaacagauagcuggagugcagccuaaaaguaaugggagaaaaaaaaauacccagccaccacgucucaaauuuaaacagagacauccuuaaaaaucucucuauguauguauccaccuacaaugaacaugggcagcaagacagcaacgguuuuuaauuucucucuccuuuuggauaauuccaacaauaguuuucacagacuauuuuaguucaguuuccuaaaaccauguuauuuauuuuuuugacacagcuguaaaacagauuacuuguagaaccagaaaguaaaaauuucgaaauucugaaugaugcacuuuucuauaaaguuuaucauggcuaauauuuuuaaaguucaugggauaauugauaaagaaguuaugggaugacaaccaacauggugccuuaaauuaaccaaagguacauuucugaguagcuaaccccuagucuacauuuuguugaugugguuagaauagcugcaagauuaaaugucauuacaauuaccagaaggcacauuuaacaugaaaagccaguucuccugucuuccaauccuguguuauuucaaaagcaccuaagaguggauuugcauauauguggaugggaaguaaaacuuucacauaacuacauagaggggaaaaaacaguuuuaaguguaaugcaacaguagucaauucgguugaugaaaacccauccaucuauuuaaauucucucucagauggcucacucucaucgguguauccaagaacucugcagugcguaccugaugcggggaagaguaccucuuuucauaugucagucuauucccuucuauggagaagcgaaaccccuuccuccugaugcugucuucagacucagacuuguggaauucaucaucaucuuucucuucuccuccagacugcucuuucuguuuccuuuuuuuccuccgauuucgucuuucuuuagcacucuucgaacucaacuuagaggcuucugaagagcuaucugagagccugccugcugcacugggcucccuggaauguucugaggcuguuguagccgcugccugcuauauagaggagaaaccaauucaguguguugcaagaaacgacugcauuaaaucuuuaagaugcucaaguuuggugugucauguccaaaaugcaagcuaacugaaaccaacaucuagaugauguuuuccagguaugaagggaaguuuuuuuuucuuuuuaacuaauaaugaauuuuaaaaauaaucuacuuuucuccaugguaacauuuauuaacuuugucugaugccgcagagauucguaagauucauuggcagucaagaauaacucaagauucuauucaaagcugguaaugagguagugagcagggguccucucagguuuccaugcuuaucaaaguguucaauaucuuccacauaguaucaacauauguggagauguuccacauaaucagcguuaugaaacauaucacaguuucuuccucacucuccccugauacaguuaucuauagaaaggagagaguugagagcuuucugcuaagcaaguuaaaagauguucaguucucuaaaagccaucccaacuaucuucauaucaauguuggcucuuacuaguuaugggguaagaugcuguguggucacagcuuguucuguuaugaagaaguuagaacuucuuagucaacauucuucccacaauucccuuaaucuagaacuguagcagauaaauuagcaugcuugaaguaacucuuuuuuuuuuuuauggucaagaugguuacaaauaaauuugauuuaaauaguuuaauuagucuuuuugaaaauacacauaaugaauucguaugucccauuuagaaaccacaaggaaacgugggcaauuggauucauuuuuuuuuuuuucauucagugagucagguacacugacaagccauggaaaggucaaguaaaccucuuguaguacuccauauugcuaaugaugcuucuuugccuaguggaugguuuugaccaagagaacauuuuauuaaaaggaaauugaacaaccccaccuaaagacauuguauuucugaauaaagaaaauaauaaauuacuuuaaugaaauggccaaauggguuuuauaugucaacuaaugaauuugcuugucagaaaagauuguugucuuaugauacuuuuucuaaugcuaguauauuugaguaaaagauuuuaaacuugggggggggcaaaaaagcccaaaguuacuauuucucuuuucuucuugauucuauuuaaagugauaaaaauaacauaagaagcaucuucuguagcuaguguaaaacagcucuguacaacuuagugaugugacuaggccaauucaaacuaaaaagaugacccauacauagaaguccuuggaguuugaugugcucagcuuucucacauccugucagaugacucugccuuuuguuucauuacagcucuuuguaacauggcagugaaagaggugacaccagaagacuagagaaaugaaggucggagauaagaccuacuugaacugcugaguaccugugcagccucuugcugcuucuuaaguugcuccaacaucugcugaaauucugccucuuucuguucagccuccuccaguguggccugauucugcuccucauaggccauggccaccacagccaggaucaaguuuaucagguagaaugagcccaagaaaaugaccagcacaaaaaauaucauguagguuuugccagcagcacgcaaugucuagaaacaagaauaugagaauuauuuuuacaauuaugucgguauugggugacuucacauuuuaacuuacuuguguauguggcagaacucugacaaaauuaacauugugucccaucaguauuucuuuaaccucuaucucuucuuucuucuuuaagauaagcauucauagucauaauaagggauucuuggauucaccaggaauaacaguugauagaaagcaauggggaccaccaugaaaaagcugagccuuucauggaaauuaaagagaccaauggaaaagguaauacuugagcagaggacagggcagagggaagacuuggcuuuugcuuaggagaaauuguaucuaagaggaaugagaaauagaauucaaggcauggagaaacagaacagaauuacucuccuuggcguuacuccauuuaaugcguauuguaaucaauggguuagaggaguccgagucauucuuucucuacuguaucaugcugcggguuguguuucaugacucaguuuguguucuuacacgcuuuuacuuaaauuuucagauucucaccaguugguauagauuuucccagaaguccugagucaucagucgaaacagggacaaaaaugcccaacugaagguaucaaagcuuguguaaccauaauuaggguuucuaccagcuuuuacacacauauauccuucuggacauuggcugcaaauggggaaaaagaaaguaugacaagacauucugcugucuucuuacucugguagaagccuacacuuacaaaauaaucuagucacuacuuaaaggacacaggcguguggaauccgaauugcugauacauuucccaccuuugacuccauaguaucuaucuuauuagcugcaagguauugauauugcuuaguaaccuuuuccccucacugugaagucuccaaaggugauucauagcuuuauacguacaccaagaaaauagcauuacagaucaaaguguugcuucuugcuuuacagaugaaacuuuaauauuuagauaauuucuuguuuuauuuauaucauaguuacugacaauuaguaugcauaaaguuaguugcuguuaucagucaauuucuagagccaaagauacacacagacacauccauauacaaacauauguauggggacauacuacacauacaucucacacgcgugaucagcuuacccugcaucagagcuauuuccacacagcagugcaucuaaaacacccuccaggaaauaaugauauccuguuugaaaaaaagagaaagccacaugauacacacuugcauugugaaacacauuaaaagaagaguaggaaagucaggucuuacuuuuugguucacuaagugaguuuacaaguaucuuaucauccacuuaaacacaugaguuuuuuccuuuucuuccuucaaauucuguuauuaaauuaaagguaucgauaaucaacuguacgagguuuuuuucuuuucauuauuaguggaauguuagugacaaccauggguacuuagggaacauuuaugaaaagguaucaguauuuucuacuacuuuuguaaaauaaagaaaaaguucaucauccaaagaagaugacaaugauggguaucucaaaaauaacuacauauuucaaaagaaaaaaaugauauauuuucuuguucuauuuucauauuuucaaucccuguuaaaacuuucaaauuaauuauaacuuacauuuuucaguucguaguauauaugucaauugacacaaauuguaucaacuaucugaauauuuuaaugaaaugaaauauuuuagaauugaauauaaaacaaauaauauuucuuacaaauuaaugaaaaauguagaacaucuuaaauauuaaaguuaaaacaauuagaguaggcgaacaucaaaucuuaucaguucucccuaguucucaagaguucacaucuuucauuacuagaggagccaugucugcaagacuuuccuuggccauccauuuccuuuccaucaaagauugacaaggaagaaacaaccucagguuguguccaguagguuguaugcucacacaguauccucagaaaaaccauuaucccauugcaacuacucauucaaaaaguauuagcgccgggcgugguggcgcacaccuuuaaucccagcacucgggaggcagaggcaggcggauuucugaguucgaggccagccuggucuacaaagugaguuccaggacagccagggcuauacagagaaacccugucucgaaaaaccaaaaaaaaaaaaaaaaaaaaaaaaaaaaaaaaaaagaaaaaaaaguauuagcaguauuagaaauaaagcgacguucauuaucccccuauaacuuaguugggauuuuguauccuuucaagaagugaaaugaguagauaggaacaacagaaaaaagagaauggaaacaggccaccucaggagguaggagguggggugacccucuagaauguaccagagaccaggaaggugagagacgcucagggggagggaccuuaggugaaaugcccaaccguggguagaaggaacuuguagagcccaccuccaguagaaagacaggacaucaaguggagggaugggguugccaucccaaagucaaaaacucugacccagaauuguuccugucuaaaagaacugcaggaacuaaaauggagaagagacugagggaaaggacguccagugccagccuaauuagggauccagcccaaggggagacuccaaggccugauacuauuacugaugauauggugugcuuauggacaggagccuagcauggcugcaaucugagagccccaacaagcagcugaaagagucagaugcagauacacccaaccaauggacagaagccaggaacuccugcaguugaauuagggaaaggcuggaagaagcugaggaggaugaccaccccauaggaagaccagcagucucaacuaaccuggauccccgagaccucucagacacugagccaccaaccaggcagcauguaccagcugauaugaggccccugacacauauacagcagaagacugccaggucuggguucagucagagaagauaaacuuaacccuugagagacuugagaucccagggaguggggagguuuggugggguggggugugggcgggguguagggacauccucuuggaaaugggguaggagggaggagguaugggaugaggacuagucagagggcagacuggaagugggauaaugacugaaagauuaaaguaaagaaagauuaaagaauaauaaaagaaauaagguguguaaauauuuucaaaauuuacaucagauaauuuucuaagugacuacaacauccuugugaucauguuuagucugugacuagacaggaagcaggcagacuaugaaaggauaaguacacauauugaugguucuuacuugagucuugaauguaugauuuccagucaaacucgaacacgguuucauuuacaagugugccauuguaauccauaguuauauucuucucuaugcuauguuccucaagggaagcguuggugggaggccacuguacacauuuauuccucagguugcccaugaagagcugcaacccgaugagugcgaacacacugagacagaacacagugaguaucaugacgucagacagcuucuucaccgacuggaucagggcccccacgauggucuucaggccugagagaaagaaguguaucaagcaucugaaauauuaaauaaguccuucacacaagucucucggagacacuaaauaaacguguaagucccaaaauguggcccauggcagggacauuguccuauaaaaaguucgagaguguagcuucauuuaagaacauagcauucaugcuguuguagguuauucuuuaagucuuauaauuggucuuuuguuagcaaagaaugggauuguuuuugcauaggcaucaauggguauaaugaauaaaaaugaaaaauuuauacauauaauagggaacaaauucuuuauaacauugacauuacaaaaauacuuuuuuuuucucgagacaggguuucucuguguagcccuggcugucuugaaacucacucuguagaccaggcuggccucgaacucagaaauccgccugccucugccucccaagugcuggaauuaaagguguauaccaccacuguccggcacaaaaauacauuauauaguaaaaguugguuggguugaauaucagaguguccacaaauuaaacacaaagguugauaaaaccuccagagagaguaaucuuauaggaaguacucagucuuaugauucucagcuuucuguaaugaugaauggcaagcaaggaggcucaguugaaaaagucucagaguuaacucacugauuaaccuacaugcuuucauauagcucucaccuggaaugacugaaauaguuuucaaugcucgaagaacucugaauguucucaaugcugagacauugcccagguccacaaacuccgucacauaucuguaaugaggaguucacacacagacacaauaacaggaagcaaagaaaguuuuguagguacaauuaccuuaugcuuuauaguaauugcuucuaauuagaaaugugggaauggucuuuagacucaauccucuaaaugugugaauagcuaaaaauuaccuagguauacaaacuuuguuacuuaccuguaaaugauuuaagauugaaaagacacuagcauuuaucugauauuuuaugaagaucuuugcugcuuuuaaauaguguaaguugcaaauuaaaauuuagacuucaucaauguagucuuauuuuucaugauaaauaccacaacuaaauguaaauuucauaaaauauacaaucuugaugccauuugguaggcaagguagaaacacuauaugugaauugggaaaauuaacuaaauuaauuaguuaacuggaaccaaauccacaggcuaggguuucagcuagaaaagaaaugauauaggaaaucauccaacagaacuaucgauuauaaaagauugccucuugccccacuauucaagacucgcauuuccuaaaauaacguuugaauagaaguugaacaaauaaauuaacaauagcaucuuacauggcccaaggccacucugucaucacuucuauuuuagucucaagagugagaagucucaaauacuguccugaaaguuguggcugaaacgcaugggaaccuuucauauuccaaucagacauaaaguuauacaguuaaggucagacauccaggauuugcacuuuggagccgaucaguaccaucuccuguccuguguaucccuucacuccugcugaugcccagaaagucagcuacccagaugggauaagugguauuaauccacuguccuccauaccuacuuuugacuauucuugaauagcuaccuauuauucucaucucuuccugguguggaggggcgugauuuaucacuagcaaaagggagaagacaggaaaguagggacugaauauacaacucaguguauauugaaaagcuuuguguugaguaaaauaaagaagagccuaaaaacaagagagggagggagggagggagggagagggagggagggagggagggagggagggagggagggagggagagagagagagagagagagcgagagagagagagagagagagagagagagagagagagagagagagagagagagagagagagaggaauacaaauugaaucagaagggaaauagaggcaagguaugucugcucaagaaauaaccauuuauuugauuuaugauguaucaaaugucuuuuucaccuuaggaucuuauuuccagcauggcuacaaucuuucuacuauucuauaaagguaacaaaagaagccacggggugaggcacaacaggacuaucagugaaaaguucagugcaaguuugugggaccagugcaaauuuugcugugugaacuuucaaaaccauccuccagcucaggagauaaauaaguuaugcuucaguauuacaaguauuugugugaggagaccagaauauacaauauuuucuuucuuuuugggggguagggggugagacaggauuucucucuauagcccuggcuguccuggaacucacucuguaaagcaggcugaccuugaacuuagaaauucaccugccucugucuccugagugcugggauuaaagguguucgccacaccugccuggcuacaaaauuuucugauguuuuaaguguuauuaaaauugcuauuacuauucucauggagcaguggaauggguuuacccuuuugagguaaauguuaagacacggaguucaggugcccaaaucaugccaggauguuuuaccacucgagcauguuguuuaaaaaccugagcauagacagcaaaccaaacuguauucucucagguuuccaaaagagaaggcacuuacgcgaauguaaugacagugaaguccagccaguuccaugggucgcgaaggaaaguaaaaucuucuaaacagaagccccuugcaauaauuuuuauuagugauucaaaaguauauauuccugugaagguguaccuagaaacaaguagccaaaucaauuaaggacuuuguaauuucauucagaguacaucagcuucuuagcauguuguccucggaaaacauggauaccaacaaaggaaacaugugaguuugaauaguuucagaauccaucacauacauaguuucuuaugguuuuuuuuuuguuuguuuguuuuguuuuguuuuuuucccagaaucugaccuuccauuuagaagcacuagaagaagaggcuuugggaaacacuguggggggugaaaggucagaaaccagagaguucuaggugucagaacaugggcaggcacgaaagcugcgauugaaacauccagagcuccaguuacauaacugccucuccuucuacuggggcaucaagagcuggccagugucauuaguaaugcuuccagcccuugagaaugcuuccugaauuuccacuguagacauuuuagccuuccauaaacugaauuuccaaguuuuauaauccugaaacuuuaguuaaguucuugaugaucauacuuaaaauagauauaaaccuggauaaaucccagugaucaagagacucaauaugguucuuuauuauuauuagauauuuacuuuauuuacauuucaaauguuguccacuuuccugcuuuccccucugaaaauccccuauccccuccccucucccccugcucaccaacccagccacacccucuuucuugcccuggcauuccccuacacugugguucuuaauguagcauuuacagcuuaaucauuuugauucuuaauuagcccaauuaauguggagguuaucuggaauaaaaaguccagcauauauugucuauauuucuguaguuacuuccaucaauuuucuuuucaaauacuggauccugaaagaaaacccuugaguuuucuaguagacuuuguaucaauuauaugaguaaagagaaauccuagaucugacaccagcaagccugggacccaaugacugcugucuuauuuuaaagcugcaucuauaaauggcuuuaucacacauguucuccaguuuaauuuaaaggcuacauugagaaauaguuucaaaaaucucaaauauauguacaggaacaaacauuuaaaauaaacuuacuccacauucuuuguccagucgggaggguuacucauugucauaaauacacaguuugucaaaauagugcacaugauuaacaugcugaauaauguagguuaguguuaaggaacauacaaaagaaaguucaugcauuguauuaaaaaaaaccaaaguaacacugaaaaacccagaccucaguucaacaggacucauggguaaacaugugcacaaauacuaccuaaucuccuuacauuucacucaaauuucauaugaugcuaaauaugcaucauagugugaccuccacaauuucagaguaaaugagaguauggaaggacauaagaauacaaguugcuauugcgguuguuuuuauaccagcaugauuaccuuccaaggugcuuuuucuaagcgggaaguggaggugguugggggggugguggaugcauuucucucuuuuaaaauguauuuaaauuuuauuugcaacauuguugagcagaaagcauggaugugaauuaauugcacaauuagaauaguaaauuuucgaggaaggugcauuucugcaauaccgagaucucgucguuaauggauagaauuuugacgucacggucaaagcagagcguggugcagagugcuaaguagccguguuuugagugaguuuauguaagcacaacagcaugagaagauggaaggggagaugugugaaggucagggcucaucgccacugggauguaauugaaauuccacagugacaccuguucuugggccaaucggucacuuauccuuucugugccuucaaccacccucuggcuccaccuacauucaacacccggauguuaagcuggacagacuuuguuauuggucgcguagauuaaaguaaucagugaguaugaaaugcucggaagcaaugccgcuggagaaauguguacgcacugagugguaggucagagaagaacagguaauagggccauugaaaguggcuguaaaaaguguuuuagaaaugccagaaauaaccgcuacguccuggagaaaacagaugauccgcaggaucuuaaaauauguguuuucugucuuaguagcagguauucuuucuacuacacucgacuaaccacacaaaacauuuccauuagguguagggaaagauuucaucaaaugaccacaugauggcacuagaaaugcaaacuaagauggaaaagcuuuugagugagcauaggcacuuuuuauaagguacaucuuuaguguucgaugauagacuauuaauaggacuaacgauuuacuugugaucaacuggacucaaaaagaagggccuuuauuuuuuguuguugcuuuuauuguuuuuguuaguuauuauuuuacuuucuuguuuuguuuuguaucuccuuuuguugguguagugcuguuuuuuuguuuguuuguuuuauuuuuuuuaaaugaacguuucuucuuuagucauuguuuuuuguagugccagggaacaaaucaaacccagagccuuguguuuggacaacucuuuagauuuuagaauuugugauuuuaaaaaaaaucuugcuaguaugaccuuaugauacuuacaauaguauuuuuauacuaauugugaccaaggccaccaaaagagacucagucauaaaugaagguuuuucacugaucaauauccacgccggaacugaguugcagaaaccuuuaaacccaaaggcgaccacagaggcaaacucccuucaaccuuuuagaacaguuuuagcuucuuuccugaaucugcacuaaagagacaaugcuauacaacagacccauauauucuguggcuuaaaucugauauucagccaacuucauaaaacugaucagaaaaguugacuaacuagcuaagccugaagugucuugagauucuuauaagcuuacaugauccccccaaaggucuuuaaaauggcauacaucauaucugugucuaaucuguauuuuacuuugaaaauaguuuuuuugugugugauuaauuuuacugaaaauuuuaugcaacucuguacaaagauguugacaagaaacauggcgaucuugcacaaaacuuaggggauucaauacauauaugaaagcuaguguuaguugucaaucugacagaaucuagaauacucuaacagacgggccucauugcaugucucuggggaauuauugugacugcuuuguuaauucagacggaaagacccaucuacuguggcuggcaccguucccuggcugggauccuggaauguagacuaggguucagggcugaaggggugccuuaaugguaggguguuucccugacauuucugaggccccggguucaauucucagcacuacaaaaacaaaaagagauuuccuugaccaacaaaagauauuagaugaaagcuauagaguauaugcacauuuuuuuaacuuaauaauacauagaagacacaaugaauacaaacaguuaacaccaaccacuugcaaaaggauaugaguguaccaaaaucuuaauagcuauuuuccuaagaggauugaaggguguuaaaauguacagggcggagguggcacugaaccggaagauggccuucccuuuauucaauacuauaaaagucuguaaaauaggaauaaacacauaaguauaaaacagacuuccuauuuuccaauaggguugcagugaauaauuccaauucagaugcccaggacaaucacuuuugauauguaccaugaguacagcucucucuggucacuuaugucccagagaugaacuuacaguggcucuuaccuuccaccaaccacuuaccugaguuugugcaucagccacgagaauguccucauuuccuuaauauuuuaagugucuuacuuaagccaaaguuugaaauggggacacauuucauuuucauccuaacauucacaagaauuccuucucauaaugauuuguuugccuagaugaaguaucaggaaaaugaauccugcaggaugcaaaaucauucaacagaaccgaauguuuuaaaaauaaauauuccuucacuacccgugcuuauaaaauaaacaucaucgcuccgcugguaauagagaacaaaagcagcuuccaucuagcccgcaccuauuggauggauacuauccagucauugauuucugcaggacaggcucccuggagaguaucuuguugaccaggagugcuaaauucuguauugggauuccugagguagcugacacuugguuucuaaucccaauugacucuccccuguguggaggaaaagcucaaggucccuggagaacucaggacccauaaauaugaagagcaucuacgacaagagucagacuuacuacacagcaaagaucagugugcagagggaaaagacucaccaugcaauggagcaacacggcuuagucugacacagucuucuaagucauuuacugauacucagccuaggccgagauggaugaagcugacaucucugugaauaacacacuaaauagagagaaugcuaagguuugaguuuauuuuuuuuuuagugacucuauucuaauuccuaaguauggggaaugcaauuaaggccuccugcaugcuaagcaaguguuuuaccauagggucauguucccagcucagggugugugugcacaugcguguauaaucuauaaccaacccagaguguuauacaagggauccaccaccgaaugcuguccccagcacagcuuuuaauauguuuaugcaucuauuccuuaaaacucccauguuuuagccuuuugaugcauagcucuauggacccugcuaugauuagcacacucuauaacgugccguuuguuuucuccugagcauuuuuugauagcauuucuucuucacauuuaaacuuuaggucacuaacauguuuucauuuuauuuuucacuuugaccuugagauuuucaaauggagcaauccuugaacacagaguuucuguuugaaaauagcccuuucucucugggauucaaacagaaaagcucuaaauguacuaugaaaauauccccuaaguaguggggaucuguuaguuuucucagcugugacacacacacacacacacacacacacacagacaaaauccaacuacugagaguaaaaccuguguuuagaaaguuguaaugcaauuuugagucuguugaaaaugaugauaaaauaaaacaagagacuguaggcugggcuaucccauuucauuucaguuacuuagcaauuaaugucacugugucauagauaaacagagaccacaucaccugggugggaaaagugcugcuucucuaagccugaccuuugaccacaugucaucuaaucaucacugaaugggugcauccagcacaagggagacgaccuuaagaugucugugagggaggaacgcacuccaguggcaaucgcuugugguugguacauaguucccguuauucucucugauucauucaauauuuuugucccuaaacgaccuugugaaagcaucauaaaacaugaauggacuuggguaagggaaauauccuugccuuaaggaaugugagcauccaaggacacagaacgagcaaagcuuaggaccaaugauuuuuuucaaaguucuugccuguaccuccuuauccagaaacacagccagucaaaugugauagaaauauugggggcuagaguaggaacuguaguuaaaaaaauuguaacuagaaagaauauauacucuucaccuaagaaucuaauuucauauauuacuauagaccgauuuugaaaugacuauggugauagagaugacaaacgaguuucaggguuacuguagcaucuuuuacaggcuggaggaugagucuugggagggucaguaguaguucagugggcagggaaauucccaggcucaucccauugaaacuggcuauacucagaaucgcaaugacacagguuccuuggcaaccuucuguuuacaugaugaguaaaggaagcuguagugguuugaaugagaauagccccaguaggcauguguauuucaauaugugggccucggaugucaaaacuguuugggaaggacuuuguuggaggucauguguuaacagauguagguuuugagguuccaaaaguccaaaccaaccucaguuuguguucucucugucugucucugucucugucugacucugucucugucucugucucugucucugucucucucucucucugucucucucugucucucucucucucucucugugugugugugugugugugugugugugugugugugugugugugucuuauucauggauacaguacaagcucucagccacuguuccagcaccaugcuggccugccugccugacugcugucauacuuucccccaugauggucauggacucaugcgaaccccuacaauaaaugcuuuccuuuucagguuuccuuagucauggaguuuuguuauggcaguagcaaagucaccacuacaggaacacuugacagaaaauagaaaagagaaaagaggaagcagggacaaaacaggaauuauuagugaggccaaagcugagacucugaaacuuagcaagagagaaccaggagggaacuuuaggcacuggaacucagcaaagcaguguugguaauagcucggcaaccccaguccugauuaauaauugaaaauuuggacgaccagugguugaacaccuugacauaauucuuaaauuuucaaagguuucuguccuuuaugauauauuugauacaucuauuuauuaaaugcaaauaauuuguaaaaacauguugcauaaagaacuucaugugcaauguagguggguugaaacaggagacugaugagcuuugacugcacagcaugcuuucuguacuuuaauuuuucauaagauuucuucccaccccugccaaggacuguaacaauagugccagccuugcagaaccacuuucauuguuucuuacccaaugauagauauauuccuuuuggauugaaacauacaugcaaaugcgagcuuccuacacaucacucugaaguguuuauggguuuagcuucaauagcuuugcaauagagacaguauucagacuuagauagcaccucauuauauguaggauuguagucguuaugaagucauuaaauuugauuuagaacuuaaguuuacuuuuuccaacuggucugcuauuuauuuuuuuacccgauaguaucuacuauguuccucacaacuuuacuauaguugagaagucagguuacaacugcagugccacucagaaauaccgcacugaaggcacugcauggaggaaagagaaaaggauccaaggggaucaauguucacuuaaaacaaaggauuaacuccaaagcuaccaaccacccagacaucccccuucucuauuuacaugugcaaauugcccaguggcaagcaccaagaguguaccuuuuaguagaagguacuaaaccuucuacuaaaccuaucccuugauucauuuauuauaggggggggggggauaaaugcuuuaaucucauuacugcaauggaguagaaauauaagcacuugaugagaacauuuuaauaccagaauaauuuucuuccuuggaacaaguuuuuaaacaaggcacaauggguaaauucagauauaaccuuuauguauaaaaacugguuuauagauguauuuaugggaacuaaguauuccuacuuaggccuuaggacuuuuccggcguguguguguguguguguguguguguguguguguguguguguguguguguguguguguuaaaaaaugucuuuguaauauuuauaugacaaaaaugaagucauaugcucuaauuuagguguaaaaggugacugauuagcacuauauuugcaaagcuuugugcugcauucugaaaagaaaacacacauaucuaaauccgggcacuugcaaaggaaugcucagcuacagauaguagcacagaugaaucuagaagacgaacauauggagguguagauagcuuagaacuaaccaauaggaacauaauguaaagacaaaccuguacuuuaaccaaggauuucugauugucuaaguacuacaugaaaagccaaggaagaggugaagugcgucuuacugguguuuucuguaacucgacaacauuugaggauaacaucauauuaaaaaaaucacugagguauuuuaugugauuuuuuucacaaugucuccagucuucucaaucuggucuuauucuauuuuagguacccguagccauacuagcugaugucuaucuacugugcugaacagauuugaccugacuuucaaccacucauugacagaccaagucacacucuucagcaacccuugauggaaaaauauuauuucagguguuaaagaaaagcauaaggugguuugauugaaaaccgauaagcaucccugguaaucaacaguuuuaaugaccccuccccuccugccaaaacaaagaaacaaagaaacaaagaaacaaacaaacaacucaaaccucagggaaaaauaacagcagauuugucucaaguuaagagcaagaguuuugugaagcaacaguuuugcugguuagcgauuaaucaguagugauucgccaguucucaaugguuauacaggauauguggacugggcccuucugcuugcugugaccuaguaacuucauagaacaugacuggcugcugcgauuacugucagggaugaaacuuggauuugacaagugguguauuugcacuuuuguuuucugaauauacagccauugguggaaacuuuauuucaaucaagagcccauuuaaaaaaaaaaaaaguauacaguuauaacuuaaguucuaauuuugcauuucaucuagacauugccagaaagcugugacauaacagagauuacauugaaauguacuccauucccucucuaaaaguuagcuacaggcaaaagucagagauaacaugugaaagugagcuggaugccaggcaugguggcgcacgccuuuaaucccaguacuuggguggcagaggcagguggauuucugaguuugaggccagccuggucuacagagugaguuccaggacacccaggcacccagggcuacacagagaaacccugucucaaaaaaaaaaccaaaaaacaaaaaaacaaaaacaaaaacaaaaagugagcuggauaacuagaaauauuuuaaaagcuguacauccagauguggagccucacucccguaaagcuagcagcccaaagcuaaggcaggaguguugugaguuugaggcaagauugagugcuggaauaaaaccuuuucucaaaagaaaaaccaaauaaauaguagguguuauaagcagacuaaauauauucuuugccuggaacuuuaaaucacaggggauuuuuaauucacacaucaucugccuucuaaaaauguaucuggcagucaauuccuuuggaauuuuaaugcaguuucacagaagagaguaaauaaauauguucuuuuuuauuguuuuuuuuuuuguuuguuugguugguugguuuuauuuguuuuguuuuuguuuuuugucucaaacucaauguaacuuucuuccccaggugcugggauccaagccaggcccaacaagugcuaaguaagcacuccuccagugaacuauucccaggccuuauguaauuccuaaagaaauauaauuaugaauuaauggugguuggaacuguaucacuauguagaaggaagugccagucuggaaauaguaacauggcucuaaguugggcucaggugcgcaucucuacucuguaagacucugguggucagacugagaaacugcccuaacccuaucagggaguggggcacauuuccagagguuccgcaguaaggggcgggggugggagggcagaaugagagucauguaccaacauagcgaugcuucaaagucugaugcuucagguagucagagauuccugucagucuccaucuccgugaacauuuuucauucuuguccaauccaugcgucuaagucuuuuucccucucugagaaucuuuaaauggucuccuuuccuccuccccuccucuuuuauauucauggcuucaaacaaagauuuuccucuuuggcucacgagggaugacaagucuccucacagcuuaccucacagcauuugcuucucggcagcaggcuaaccucaauuaaucuaacacagccuccaccaaguuaauggguaaggucuuuaagccacugauuacaagcugaaaugaccagagaguggaaagagggaauggguaucugagagucauuauugucacauuuauaaacuuugggagauaauuuaaaaguuaaacaguauugugcaaaaauagcaaaaauuauagauaucaguacuucacaauuaacuuaaguuuuaacuuuggaucuacucucauacaaaagagcgcacuguauacagagggaagauucugucacaucuauguuuucucagguuggaagagaaagcagggcagauggagggaaugcuauggcauuauuugaauugacauuuuuuugggaucuccuaaaugaugcccuucacuaacuuaaggccaucauaugauagaagaucuauuguauacccugcaacuagagaaucuaaccuccuccucauaugacaggccagaugcucuguuagcaucuucuauguuuuccuuuuuacagaagcuugucuucgcaucuaaauucagaugucauuuccuuucagaagcccaccauuuaaguuuuaaguguaguugaauuguauuagacgcugauacugagcauggaagauuuguuuuuacaaagcagggguuuggcaacaugccaguagcuuacuuauuaguuuuugcaaucuuagacaaacuauuuaaccucaguuuuauuauucugaaguugagaccaaaacugucuugaaagaaccuguaagguaccaacaugaauuuaaaaugcaagugcauaauauauagggagguagcaguuguucauuuuuacuuaucuggaauaacuucucuagaaguuucuaucuucuaauuguggagaacaucucugcuccacugucuguccuuguggccuaaauacauuugccucauucuuuaggacgugauucagcaugugacccuuaccugguccagaauucuugcucagaguuuggaaaacgcaugcaccuauccucaagguuacucugcuguagauguuaacuuacuguaacuggggacuauuuuugccaugugugggugagcccaccuaugcaggaagccaucacagagcaaagcagagccuacacuguccaugggcuguccugauggugucaguuuagauuccacgucuuuuguuauucaaacuagacuuggcccauaaguuugcuuuucuucuucuucuucuccuucuucuccuucuucuccuccucuuccuccuccuccuccuccucccucuucuucuucuucuucuucuucuucuucuucuucuucuucuucuucuucuucuucuucuucuucuucuucuucuucuucuucuucuucuucuucuucuuccucuucuucuucugucucuccuucaaaguaguuuuugcugaguuuugguuacuuuuauccaaagggucucuuaacuaguaugacuagaauaaacuaaaugucaaagguaauuuauuuguccugggacauuuucugaggcagaggcuaagggcugauuuuccuagaagaauaaaaccuuccucacccuaacugaaaacaaaauaagaacuugguaccucaaucauagacacucuugugaugacagaugagauauaaauuggaagccucuuaugugaaccccaguagagagauaguauccaucauuuuaggucuguugguggagacaauagguuguuuuuaauguuaggaaacauucaaggacacaguacaguuuuuaaaugaauacauuucuauauuccaaaauauaacaagcuucuauuuucacugcagaucuagaauaucuuucuauuucuagucaaaugccacauugucaaaaggauauuucuucccauggcacuaaugagucaucuguaauuuuaagaacauaagaggggagacguuuucugaacaaagagugggugaagcugaauguauaggcaaaugguacaguaguagcucaaguuaugaaaccgacaaaaaaaaagucccauaagaaaaaauuguacucacaaacugaaauguccuuguuacacaaagugaaggaacaaauagaaaguauucagcuucgacucauaccuuaaagguccccugaggacagcaaccaugagauggaaacucagugcauugcaacuuugcuaucuccuuuccacuucacgguuguuacuguuucuuucauugcuaauaaaggaucucugaucacagcuuaaaucacuuuaauaauuuuaguagaacauuugauuauuacauaauuugcagaucagaaacugggucaaagaggauaaaaauaugugggcauaugucacgauaacauauaccacugucagugacauuuccacuagcccaauggcauugguuaucuuuauaaaaagaacacagagagcccuggcaugcuacagugccuucacacagcacucugcacauauggugcaccugcacuuuagccugagguauaccauaaagaauacauucuguaaccauugucauggucaaugcuauuguucaauauuugcccuucccaaaacucauaaauugaauuauuccauaauacaaggugggaauauuuaacagguuauugguuaaugaaggcuuugccuucaagaaugaauuggugccuuuccaggguaagauaauagacccuucuugcuccuccuugccuuaaacccuuccaccaugugaugguuuaguuccucaaucuuggacucucuggucuccauaaguuuaagccaauccauuucuuuucauuauaauuccaaauguuggaugugauguuacagcaggcuaaagggucuuagagauuuggcuuuuuaaaaucauuuuacauauugcuaauaaaugagcaugaugauuuauauaaaaauaacucauuaaauaaguucaaucuaagggaagccauugauguuugcauauuucaacucaaucuucaaaacaaauccauauucacaguuuuuuucagucauggagaaucucacccuuaaugauuuuugaccaguagaccccuuggcugcuucaacucauucacuuuuccccucccuucuacccuccuucccucuaugucucccauucucucucucucauucauauauauaugaaggcuacauaguagucacuaaaacaaaauuagugaucaaauauuagaagaaauauucuuuuaaaagacugagauuuuuacuaagcaacuucaauguaaaucagagaaaacuuaauguuuaugaagauuauaccauaagaaaacaaucuauuuaugagagaaaauuuaagaccaguaacauaauauacaggcaaccuaaagaagguuuuaaaacagagcacuaugaaagaaggcaacauucugaauguggcuuggccauguguucuaaaguacucuaugcuggacaagcugacacauuccuacaaucccugcaccuguagaaaggaggagugugaguucaaggccagccugggauacauagggaauugcugucucaaaaacuaaagaaugaagcacauagcgugucuguuuaaaaaacaaacaaaaaacaaacaaacaaacaaaaaaaucuuagcucuagaaaugucuaccugcgcugcuauccaguggcucacaucuggagaucuguuugguggaagaauaaugugaaaaugaaggacaugccuuucauuggaaaaacuccuuccugauaacaauaucucuccuaucagguuguucugcuugcacaaugugauuuguuccaaaaugucugaauguuuuuccuucuucacacaaugugcauuugaagauaaggacagcugaugucaaaggcagguugggggcagggguaggaaagcugaucuggcugccaagucaucagagcugggcuuacaccuugagcuuuuuguaaaagcuuuaaguauuugucacuggguuaugugauuuuguuuuccauuuuccuuuaugccauuguuuuuaaaauuuuaaauucaaaauaacccagucagggaccaucauggguagaaccaccccucaaaacaguaucuuucaucaauuuaaaagcucuuuguuuuugaaaacauauucuuuugcuuuuauuuuuauuauuuguugauugguugauugauuuuauuuuauuuuuuuaagacagagucuuacuauuaacuuuggauggccuggaacuugcuauuuaaaucaggcuagccuuaaacucacagugacucuccucccucugccuccuaauugcugggauuaaagguguguacaaccaggccugguagucuggaagcucuuuaauuuaaaagacaaaaaaaaaaaaaaaaaaaaaaaaaggaucugauaguuugauaguuuguauggugauuugaguaagaauggcucucauaaacugaaauaauugaaugcucaguaaucaggggagugguauuacuugagaaggauuagaagguguggcuugacauaguuauggcuuugauggaggaagggugccauggaagagggcuuugagguuuccaaagcucaggcuaggccaggcccagugguucucucuuccugcugccuguagguccagauauaaaacucuuagcuacuucuucagcaccaugucugccugagugcugccaugcucccagccauaaugauaauggucuaaaccucugaaugugagcaagcuccaaauaaaugcuuucuuuuuauaagaguugcuguggucauggugucuuuucauagcaauauaacacuaugacagucugguuaccacauagugaauuacuaugcuuuuuaaaguguuuccauuuggucuuuuauuccuuuauagauuuauaaauaaggacaucguauaggggcugggauacuggauuucaauuuuguauuuugacagggccuccucuuaguaauuuuuaucauuaauaaaucacuuuuauuuaucuuuguuucuauauaaauaaauaguaacuauuaggugguggauuuggucuguaaauuggaggugccauguuugggggaguaaauaccugaugaggaaaaggcuuucuaaccuggaccauaggagccucugaaacacugcaugcccccccgagaauuguaaguaaauaaacacaauccaugagaugaaccaauuucuauguggaacacaucuggaucuuuauuuuguaauuuccucauauucacuucugacaaauagcaauuauagaaugaacaaucuccuaaauugacuacuuuuaugucaccuugacauaagcuacagucauuuuggaaaagggaaccucaguugggaaaaugccccuucucuagauuggccuggaagcaagccugaagugccuuuacuugacugaugauugauguggcauggccuagccuguuguuguagugccacccccaggaggguggucccaggugcuauaaaaaaaauaggccaagcaagccagugagcgugcucuucccccgcuccugcuucaguuccugauuccagguuccugccuugauuuucugccccagcuuucuucauaauggauugugauguagaacgguaagcugaaauaaaucuucccuaccuucaaguugucuuggguguggauguuuuaucccaagaauagaaacucuaacuaagacauuucucucaccccaagcuaccacauauggcagcuuuuguccugacaggaacugggcuaacaguacagugucccuaaaaguuuggaguauuuuaggauucguggucaaugaaacacuugacuugcuugguuauauauucccccaacuuuaacaacuggcaaguguaauuggcuagauagugucuucaaaaaguucaagccaguaugaaacuguaucaaucuuagaaacagagucuuuguagacauaauaugguuaugauauauaugcauauauacauauacguacauacauacauauaugugcugaaaugguugaauugcaauaugcccccaacaauccuauauaugugaacuauaagccaaaagaaaucauuuuccccuaaaaacaagcaacaaaacaacaauaacacaaaauacccauguauauugcauaacuguauuccauguggaaacgauuacuuaggaaguuauuuauuauuuauaauauggcauagaaauaaaaaccucuuguguuguaaaacuuccuuccaugagaaauucacacaauauauuuuuaggucuuugguaacucagggugacuucaacauuucaagguacaaaaaaaguacuuaaaauugcuuaguccuuguaaucuucagugagaguuuuuuuuuaauuuguuaaauuagcugccuacaaaaucuuauacguauauuuagauuucugucauggggcauuuggggcagcuccauaugguauaauauaauuuauuuacuucuuaugaauaugcauaaaccacccaccaaucuggucucauuucuuaagcagagggauuguuaagccugugcuacuuuaguaugugagguuucuguaacaguccaauguaaauguaguuaguggcaaaguauaccugauaaaaacacuuaccuucuuauugauauaguagggguccagguccuccagaggcuccgacaccaucucuggaggaaugucuccauagauaaauggaagguucuucccagcuuccaagucacuguuuggcuuugggccauuuucaucaucaucuuuuuugucuggcuugggauucuuagccuucucuucugcaaugcgccuuucaauagcugcaagggauucucuggugaagaaguugaagcugucagguccuggugguacaagcacuguuugcuccaucuugucauccugcacauuuuaauuacucuuuacucuucaugugagauuccuaaggagggaagaaccagaaacguggagaacauuaaaaguuaucaauaucaauaaauacucaucuagaaaagugggccagaagacuuaaauuuuuuucuccuccaaaauuuaaauggaaaaaauaaaaaaaauguuuacacaaauucauucucuauguugagcuuuggccaagcauucuuguauguuuaggauugugcuuuaccaauagaggaacuaggcugugaguuuaaacacugguucaguauugcucugaguacauuuugauaauugucgccacaucacugauaaacuguucacucugagauguaccuguaugaugaagacgaugcccacugauagaucaaucaauucaaagguaucacacacacacacacacacacacacacacacacacacacacacacacaaccaaaaaaaaaaaaaaaaccggaaccuugucucugagaucuaaaaugcagccauugaggcuuaacaaguaaggacaaagcaguuuaacuuuguugcagucaaucagaaucacauaaaaagacagucauugcuacacuacuuaugccuguguacacccugagaugugggugaauagaucuauggccugagaacuacauuagcucuaguagagucucuuugacaaugacaauccaaggugggacaaaugccauuaauauggcugagauggacauaaacuaaacuggaaaggaagcuaugugcacaggagguaguagaaauguucuuaguucaaggaacaauguacuuuucuucaccgaaacaauucugauacaugggagagucugcaguccugcagauauuaaggccaaauccaagaugcauccuuuuaaagguauacuuaauaagaacucaaauuucacacauauaucugugcccaaacuucccagagcucaaguucugccugguacagacucuguuuuaauagucuguuagcucauuaaagucagcaagcucaauacaauuaguugcagcuuugaugucuaggucucuaauagaaaacuacagcuuccucuuccucuccucccaguguucucccuccccccauucaccuuuccauuucuucucagagaaagugaaaccucccauugauaucaacccuccucccccaaccuuggcauauuaagauguauaagacuagacauaucuucuucuauugacacuagacaaagcuguccaauuagggggaagggauccaaagucaaccaauagagucugagagagccccugcucuugcugauagagaucucacaugaggaccaagcuguuaagcucuuacauaugaauagcgggucaucccaugcaugaugucuuguuggugguucaguaucugugaguugcuaugcgaccagguuaguugauucuguaggaucucuuguguucuggaucucccuggcucuuccucucccucuuugacaagauuccaagguuuaccuaauguuuggcugugggauucugcauguauuuucauuagcugcugcaugaagccacucaaaugaauguuaugcuagccuccugucugcaagaacagcaguauguaauuaauagugccagaggugggcucccucucaaugcaauggaaucacuguauuuuaucucacucauucauucagaucauccugucuagguaucccucucaccuacuugaugguuuugagucuaaaugugcauugaauucuaucuuaguguguuuauuuguucuucuccuuuuuuuucucuuauucuauaaacccuaucuuuugguuuguuuaugacuguugaguuuggaucucagcaugcaccaaagguggaguggaacuugcuccauggcucauacuggcuuugaaauugcaauuaucauguuauacuuuccuaauuguuuggauuguggucuugcaccaccaucucugauuuuauucuaucaauucuagugcugauucuacuuauuugauguguagauaauacuuaugaucugauauuuggaagugaacugaacuauuuacagccuuaugucacuuaaaagcaugaguauauauugagaaaaaaaucaguagaugauuuuaauguggaaacauaauagaauacuuaaauggacuuacguaguauagacaaaucacucaacauuaaugcaucaaagaguccaauauucacgagacguaugaagcugcuaucagcacaguguggccugcucuuuuauuaccuuaaacaucuuuauuaguagaaauauacucuaaaauaugauuaaaaagaauauuauagaaaauccacaaacucuugacagagcugcuguuaucaucaucgaguguuaugauacaagcauaauugaaaggcugccaugaucuaugggacuggcagcagaagaugucuguggaugccaccauuaccucacauguccuguguugugccaugaguuuaggauggauacaugaauaaguauugggacuucuaagcuccacucauggagccagcuuugaguugcaaucugucugugaccaaggcaccagugugcagugcuugauaauccugccgagcacauagaucuuugcuucucucucucucucucucucucucucucucucucucucucucucucucucucucucucucucugucucucucucucucucucucucucuuuacugagaacaaacguaaacacauauauaagggcauuuguuuguuuguuuuuucucguuuguauuucuuugcuguuucauagguuuagcauuaucuuuuguaugcaaauauuuaaauuuuggauugcagcauaauuuaaauacauacuaauugcauacaauuucagucuuucugaaagggugcaacaacaggguccauuuuucauaaaauuguguggacagaacagaaguggcuacuucaagccuuccuauucaguaaaaaugagcaacccacaagaccuaacaguauuauggugugcuuacagccaggagccuagcaugucuacccucagagaggcccaaaaagcagcugacugagacagaagcagaaacuuacacccaaccaauugucugaagucagggaccccugugguugaauuaggaaaaggcugggagaaguugaggaggagggcgaccccauaggaagaccagcaggcucaauaagccuaggcucuugagaucucucagacacugagccaccaaccaggcagcauauacuagcucauccaagguccuggacacauguacaaguaggacuuccuggucuggccucagugagaaaagagccccuagcucuugagagaccuggggcugcagggaauggagagaccuggcagggguguuggggggagugugggguguggagaccccuuagagaugggggugggaggguggggaggagaaaugggaugaggaacugucugagggcagaaugggagggggauaacaacuugacuauaaaagaaaaauauuaaauauaauuaaauauaaauaaaaagcaguauaagaaaaaaugaaaaaaaaaaaaaaccuuagggcuauuggcugucaguaucaacugaguaaacaaacagccaaaaagauaggcaaauacuacugaugaauaugaccacuucaaauuuauuguuauaauaaugaccugguucaguuacaguaauuacacucauaugugaguaauuuaacuaaauacuauacugauaacauauucagguuagggggaaaguauuucuuacuuucugauuagaccuuguauucaaauacuaccaaaaaguaaaacauaaguuauauuaauuauaagaauaauaccauuucaagauugugaucuggggcuaaagagauggcuuugcuaaaggugccuguucaugccuggugaccuugagcuugcugucugccccacaggguggauggagaugacugauuccugugaguucuccucuaagcuccaccaugccacuuuuccaucucccucccucucucugucucucucugucucucucucuuaaacaaacacacagguacacacacgcacacacagauacuagcuaaguaaacaaauaacuguaauuuuaagcaugaugaccuguuccauaagguugcuuaugaaauaucugaagcugucaaauauccuucaauauuaauguuuucaagcaauauuaugggcaaaaaucuauagauuuuaguuugaacuucuacuuucucuauccagaaauaaccauuaggauagaaagaaaaaguuuggauuuuuaacuuaaaauuuuuaaacauuuaaacugaaaacugagaaugguccccauuuguggaaacacaugccucauuagagaugucucauuugaggaccauguggcuugaggcuuguggcggucucuuuacuuuagugugacuuuggaugccuugguuacauagagcagcccguguacccuucaguagagauagccaacaaaucgugguaagaaaagugucaaagagagaguaauauuuuaaagaaaaauauaagauaagaacuuauucaaaaugcaaacucacauaguuaugaagaaagaaaaaugaugcauuucauuaacagacauacuuaaaauaauaaaaagaaguaaauugccaagaaaaaaaugaauuauucuuuuagaaaauacuuuuaaaaauuaaauauagacaagucauucgaaagaaggcaacaagaaacaguaaaaucuccuaaagacacuggaauagaagugaggaccugagggcuggagggauggcucagagguuaagcgcacugacuguucuucuagagggucugaguucaauucccagcaaccacauagugucuuauaaccucuguaaugggaacuggugugucugaagugaauaccacauauguacucacauacauaaaaugaguaaaucuuuugaaaaaaauaagugaggaaaacauuuaaaacuaauaaaaauuuaauucacaaugggaaaaacagggaugaaagagaaauaagaaugaauuacuucauucaaauaggaaccuucuggcuuuaucgucaccaacaauucauacuuuaucgucaccaacaauucauacuuuauuucuauaacuuuuaaauguuuuucuaaaccugguaaucccagcuaucaguuaauaugguuauucaauaucaguacaucuuagcuauauuaugccacauaauuuuaugugugaagcaaugcuauauguguagugucuucuaaaauagcaugguauuuauagugaaaauuagcuggauucuugcuaacaugauggucagcuccugcaagccuuaccacuauuuugaggacaucaguccucuagauagcacccuucuuaauuaaauuuuuggucuacuuugcaaaauauucuacugccaaaaauuaaagucaggugaaauauuauucuuauugauauuaucucacaaaaauaacuaaaauauuuauuaguguguguguaugugugugugugugugccugugugugcacaagugcauuaaguguguauauggagacuugugcggggcauaaaacuggaggucagagagcaacuuugaagagcugcuucuuucuuuguaauuuuauguaaauuccuaggauuaaacucuagucaacaagugucuuugcccacugagccaucucccugaucacuuaaccacugacuaauucuauaaggcuugcauuguacuuagugcauucuuuguucuugaaucaaaaaccaaaaccaaagggacacaaauugaaaaggaagaugucaaaauaucacuauuugcagaugauaugaucguauaguuaagugaucccuaaaauucuaccagagaucuccuaaacccgauaaacaacuucaacaaaguggcuggauuauaaaauuaacucaaacaaaucaguagccuuccucuacucaaaggauaaacaggcugagaaagaaauuagggaaacgacacccuucacaauaguuacaaguaauauaaaauauguuggugugacacuaaccaagcaagugaaagaucuguauggcaaaacuuuaaaucccugaagaaagaaauugaagaagauggaaaaaucuuucaugcucaugauuggcaacauuaauuuaguaacaagggacaucuugcugaaagcagucuacagacucaauggaauccccauaaaauucccacucaauucuucauagaguuagagcaauuucaaaugcauuuggaauaaccaaaaacccagaauaaugaaaauuauucucgacaauaaaagaacuucuggggggaaucaccaucccugaucucaagcuguacugcagagcaauugugauuuaaaacugcauaguaaugguacagugaugggcaggaagaucaauggaauagaauugaagauccagaaaugaaacccaccuaccuaugguuacuugaucuuugacaaaggagcuaaaaccauccaauggaaaaaagcauuuucaacaaauggugcugguucaacuggcaguaagcauguagaagaauacacauugaucuguucuuaucuccuuguacaaaacacaaguccaaguggaccaaggacuuccauuuaaaacaagauacacuaaaguuaauagaagagaaaguggggaagagccuugaacacauggacacaggggaaauuuucuuaaacagaacaucaauggcuuaugcucuaagaucaacaauugacaaaugauaucucauaaaaucgcaaaacuucucuaaggcaaaggacacuguuaauaggacaaaaggcaaccaacaaauugggaaaagaucuuuacuaauccuaaauccaauagagggcuguuaucuaauacauacaaagaacucaagaaguuagacucccuuuacuacagagcaauugugauaaaaacagcaugguacugguauagagacagacaaguagaccaauggaauagaauugaagacccagaaaugaacccacacaccuauggucacuugaucuucgacaagggagcuaaaaccauccaguggaagaaagacagcauuuucaacaauuggugcuggcacaacugguuguuaucguguagaagaaugcgaaucgauccauacuuaucuccuuguacuaaggucaaaucuaaguggaucaaggaacuucacauaaaaccagagacacugaaacuuauagaggagaaaguggggaaaagccuugaagauaugggcacaggggaaaaauuccugaacagaacagcaauggcuugugcuguaagaucgagaauugacaaaugggaccuaaugaaacuccaaaguuucugcaaggcaaaagacaccgucaauaagacaaaaagaccaccaacagauugggaaaggaucuuuaccuauccuaaaucagauaggggacuaauauccaacauauauaaagaacucaagaagguggacuucagaaaaucaaauaaccccauuaaaaaauggggcucagaacugaacaaagaauucucaccugaggaauaccgaauggcagagaagcaccugaaaaaauguucaacaucuuuaaucaucagggaaaugcaaaucaaaacaacccugagauuccaccucacaccagucagaauggcuaagaucaaaaauucaggugacagcagaugcuggcguggauguggagaaagaggaacacuccuccauuguuggugggauugcaggcuuguacaaccacucuggaaaucagucuggcgguuccucagaaaauuggacauaguacuacuggaggauccagcaauaccucuccugggcauauauccagaagaugccccaacugguaagaaggacacaugcuccacuauguucauagcagccuuauuuauaauagccagaagcuggaaagaacccagaugccccucaacagaggaauggauacagaaaaugugguacaucuacacaauggaguacuacucagcuauuaaaaagaaugaauuuaugaaauuccuagccaaauggauggaccuggagggcaucauccugagugagguaacacauucacaaaggaacucacacaauauguacucacugauaaguggauauuagccccaaaccuaggauacccaagauauaagauacaauuugcuaaacacaugaaacucaagaagaaugaagacugaaguguggacacuaugccccuccuuagaauugggaacaaaacacacauggaaggaguuacaaagacaaaguuuggagcugagaugaaaggauggaccauguagagacugccauauccagggauccaccccauaaucagcauccaaacgcuaacaccauugcauauacuagcaagauuuuaucgaaaggacccagauguagcugucucuugugagacuaugccggggccuagcaaacacagaaguggaugcucauagucagcuaauggauggaucacagggcucccaauggaggagcuagagaaaguauccaaggagcuaaaaggaucugcaacccuauagguggaacaacauuaugaacuaaccaguaccccggagcucuugacucuagcugcauauguaucaaaagauggccuagucggccaucacuggaaagaaaggcccauuggacacgcaaacuuuauaugccccaguacaggggaacgccagggccaaaaagggggaguggguggguaggggaguggggguggguggguaugggggacuuuugguauagcauuggaaauguaaaugagguaaauaccuaauaaaaauggaaaaaaaaaagaaagcucagcacuacaaaaaaaaaaaaaaaaaaaaaaaaaaaaagaaguuagacuccagagaaccaaauaacccuauuaaaaaucggguacagagcuaaagaauucucaacugaggaaucccaaaugguagagaagcaccuaaagaaauguucaauccgggcguggagaagcacgccuuuaaucccagcaccugggaggcagaggcaggcagauuucugaggucaaggccagccuggucuacagagugaguuccaggacagccagggugauacagagaaacccugucccaaaaaaccaaaaggaaaaagaaaagaaaagaaaagaaaagagaagagaagagaagagaagagaagagaagagaagaaaagaaaagaaaagaaaagaaaagaaaagaaauguucagcauucuuagucaucagggaaaugcaaaucaaaacaacccugagauuccaccucacaccagugagaauggcuaagaccaaaaacucagguuacagcagaugcuggugaggauguggagaaagaggaacacucuuucauugcuggugggauugcaagcugguaaaaccacucuggaaaucagucuguugguuccucagaaaauuggacauaagacuaccugaggacccagcuauaccacuccugggcauauacccaaaagauacuacaacauauaacaaagacacauguuccacuauguuuauagcagccuuacuuauaauagccagaagcuggaaagaacccagaugucccucaacagaugaauggaaaauugguacauuuacacaauggaguacuacucagcaauuaaaaacaaugacuugaugaaauucuuaggcaaaugaauggaucuggaggauaucauccuaagugagguaacccagcuacaaaagaaccacaagguaugcacucacugguaaguggauauuagaccaaaaguucccaauacccaagauacaauucacagaucacaugaaguucaagaagaaggaagaugaaagugugaaugcuucaguacuucuuagaagggggaacaaaauauucaugggagguagaggguaggggugacuugggaggaagagaggaagaggagggggaaagggaggcaggauuaguuaugagaggagauggggaugauauacagaggggcaggaauuugaacagagguguguagcaaugggggauagggaauuggggauauccaucagcaagucccagaugccagcaaagauuggggggaaugagaccacccacucaucucaaaauucuuaacccaaaaggguuuucuugucuaaaggaaauacggggacaaaguguggagcagagacugaaggaaaggcuauccagagacugccucaccuggggacccaacccauagacagacacuaaacccaaacacuauuguagaugcuaagaaguacuugcugacagaagccuguuauagcuguccccugagaggcucugccagagccugacaaauacagaagaugcuugcagccaaccauuggacuuagcacagggucucugacguaggaguuggagaaaggacugaaggagcugaaggggcuugcaaccccauagggagaacaacaauaucaaucaaccagaccucccugccccagagcucccaggaacuaaaccaccaaccaaagaguauacuuggagagguccauggcucuagcugcauauguagcagaggauggcacugucugguaucaauaggaggagaagcccuugauccugugaaggcuugauuuuccaguguaggggaaugccagaucaauaaggugguagugggaacauucuaauagaagcggagggaguagggaugggagaggaaaccagaaaaggggauaacauuugaaaaguaaauacauaaaaauccaauaaaaaaguagacaacaaacuaaaacaacaacaucaaaagaaagaaaggaagaaagaaagaaggaaagaaagaaagaaagaaagaaagaaagaaagaaagaagaaaaaagaaaagaaagagaacaaaauuuuuuuuuuuuaggucaggaucucuuuuccuaacccugacuguccuggaauucauuguccagaucaggcuggccuugaauucacaguggccuuccuuugccuccugagugcugagauuaaaggugugcaccaucauacccauccucaaaagcuauuuugacagaauaaagugcugauauguucucagaucaagagccuaaaaaccauuaggaaauucuuuauauacuaucaauuuuugagaaauauacauuuguauaagcucuguuuuuauuuguggauguauauauguauuuuuucuguguuauuucuauuauguagucuuuacuugcuugaaguuucaguuuaaugauaaaugcccucuucucucuugaaagugucuuaaauguaucucaaauaugaugccaaauauucugguguaggggagagaaugauauggaugagcagugagagucuuuagguugguaaggagauugcagggucauaaacaggaugacacagucuaacagggcaauacacccagaugaaagguguagcccagauuaaagguguguuccuuaaacucggagauucaaucuucuggaauccauugccacuauggcucaagaucuucaaaccaagauccagauaaggaucuccaagccuccaaauaagggucacuggugagccuuccaauuccggauuguaguucauuccaaauauugucaaguugacaaccaggaauagccacuacaauccaccccuugucaacuugacacaaauaauaucucauguucacaugaaacaauaacaagguuguaaauaugccuaacaugauauaacuaucucucguacaaucgcaaaugcauuaguaaauuuacaaugggcauucacuaaaaagacagagaggccaagacggguuugaugaggugaaguggcacuucuugauauucagucggggcugauacccaaauauccacuuaguuggaggagaauuauucaccuggguguuuaaccugcaggccuccccaaccaguggaaauccugcuaugcucuucuugcccuuguauaauuuugaguaauagacuuuugugcugauggaaugagacuuauaaacucuagucaagcuuucucugaagcacugugugucuacauagccucaugcucuagguccuuugcucugagaaugguauaucucaaaugggugcuucuuccucagucuggauccuggaauaagaagacacauucacuggaugucaagagaaagcuaauaggacucaaagggucuaaaaguaacgauuuaucagugauguuugacagugauauuacuaacgagcaaguguaugccauugaucaaagaccaggcugcuaaaugaguugaauuaauuaggaauauuugucucucagacacaaauguugccagagauuagauauuccacaccucaugagucuccaccuauaguucuagaugaggaacacauuaucauuaggcaaucagugaaaucauggccuucuaacaaucauauagcaacucaggaaaauuuguucaaaggaugcuaaauagccuauaucaagaauacaaagagugggcuggggaguaguucauuaguaaagcaguugccauguaagcauggauaucuauguucagaucuucaguacccauugaaaaagcugcagcaucauccaaugccuagaauuccagugcuggaggagcagagacaggggcaucaugugggccuacugcccugacaguccagcugaaucaagaauuuuagguucagugagagaucaugucacaaaaacuaagguagaaagcaacagagaaagaagugugauauuuaucucuggucucucuaugcacaagaacacacacacaugcucauacacaaacacuccacacuccuggguauauacaugucuacacucaugagcacauacaugcauaggcacaagcacacacucccaaacagggauacauacaaaaacacacaacaaagaauauguauuaucaaucagaagccaauuauuuaaguuaaguaguaaaaaauucuucuacuaaaaagacaaccguaccauggugaggaaaugguccagucaaugauauuugcuagaacugucauuguccauccaugugucuaugcugcagcauuuaagauaucaagaaggagcuggccuagugagaacagaaaaucuaacauggcugcuauagcuuacugacuagaaguuaagugcacacuuccuaaaagaaggcuuugacacaagccacuucaguucccuccucauuuucuuguccccauuccucucucuguagaauucugagauuucaauucaguuuuauacagaaaccacauuacuguaagcccuacaaaguuauggcaauauagcuauauggagucaaguaauguagguuauuuuuuucccaauggugcuggugaagguggcaauuauguagcuauacuuagcagacugaggaaauucugcuagagucagcauuugucucuucauugcuaugaaacaguaauggaaaaauaaacaaaaacaaaaggcaaacacuaugcauaauucccucagaucauauuaacaugugauguuggaguaaauuguuauaaccccauuuuggaaauacuuaccuuaauuaacuaugauuuccuuaaaauaaugcaguauuuacaaucuauaugaaagcacuauaugggacacaugguaugauggaacagugcacccaagagacaccaagaacauuccugucuguggcagucuuuucucuauacagaggcauuuagucucaauugcucagaguuauuuuacguuuucagugacuuucacuguucauucgugugcauauugccuggacaacacaggaugaaaaaugguccaagagaagucuuugacuugcuaaagcaagaaagauguuuaaaauaugcgacacaugaaauaucccaaaaaguguagaauucuuuuugagaauguugaugucucuuuagcauaaagcuaauuugaagguguccuucuuauccuaauauuuucuuacaaaaccagcucaucucaaagcaaaaguguucaagauauaguugauggaguaaggaguuuagcacacagaacacagggacagcuacagagaaacagcaaauagccaaggcagacauaaagaggcugacaagacaugagagagaagaguauuaaacacagaucagcuaccuggaaaauggcucucugguguuccacacuuccucucaucuggaugaucuagaaacacaguaacugcucugaguuaagaaagccugagaccagcaguguguggguggccugcauuaaguugauugauaaacauucuacauauaaaaucuguacccuucacaaguuuggucaaugacacaauucuauuguaauaccauagacucauguucaaagaagaaucauuuaaggacagagugugcugaaagaauguauaggaaauaagucacaaaagaugacauaauuucuugauuuaaaaccucacaggaucauaggaucagaggugaggaggacacaacaucugucaaaacacaggaauuaacuaggaccaaugggacccaggcacacaggaacuccaccagaucaguggcacaaguuccuucuggucugucugggucagugcccugagcagaccuugggcuugaacuucacagccagucccacaacacccagaggaagcuccacucccaagugcucuaacaugccgaggaucacaggaucacagaagcuuggucacaccaggaucucagggucccagaggcagcuuaacucccaggagcucugacccauucaggaucccagaaccacaggaucacagagacagcuugauucugaggaguucugacacaaccaguaucacaggaaggaugagcuccagucagauauagccagauauaucagguagcacuagagauaaucagauggugggaggcaagcauaagaacauaagcaacagaaaccaaauuuacuuggcaucaucagaacccaauucucccaccauagcaaguuuggauacaccaucacaccggaaaagcaagauucagaccuaaaaucacuucucaugaugaugauagaagacuuuaagaaggacauaaauaacucacuuaaagaaauacaguuaagcagguagaaguccguaaagaggaaacacaaaaaucccuuaaagaauuacaggaaaacacaauugaacaggugaaagaaacaaacaaacccuccaggaucuaaaaacaauaaagaaaucacaaagggagacagcucuggagauugaaaaccuaggaaagagauaaggagucauagaugcaagcaucaccaacugaauacaagagauagaagagagaaucucaggugcagaagauaccauagaaaacauugacacaacaaucaaagaaaagacaaaaagcaaaaagcuaauccaaaacauccaggaaaucaaggacacaaugagaagaccaaauuuaaggauaauagguauagcagagagugacguguuccaacuuaaagagccaguaaauaucuucaacaaaauuauagaagaaaaauucccuaaagaaagagaugcccacaaacauacaagaagccuacagaacuccaaauagacuggaccagaaaagaauuuccuccagucacauaaucaaaacaccaaaugcacuaaacaaagaaagaauuuuaaaagcaguaagggaaaaaggucaaguaacauauaaaggcagagcuaucagaauuacagaagucuucucaccagagacuaugaaagcuagaagauccugggcagaugucauucagacucuaagagaacacaaaugucaacccaggcuacuauacccagcaaaacucucaauuaccauagaugaagaaacgaagauauuccaugacaaaaccaaauuuacacaauaccuuuccacaaauccagcccuagaaaagauaauagauggaaaacaccaacacaaggagugaaacuacacccuagaaaaagcaagaaaguaaucuuucaacaaacggacacaaacauaauuccaccuuuaacaacaaaaauaacaggaauuaacaaucacuuuuccuuaauaucucuuaauaugaaaauuaauauuaccaacauaucuuaaugaauugaaauucaaauauaugaggaauuagaaauuugucggcugucuuccaguggucucucuaauuugguaaugggagaaauagguccaauauuauacaauccauauacacuuucugcuuguuuguauaugacaaagucuagcuguguaccacacaauggucuugaaaucaugcuucuccuaucucagcauaucuauuuguaggauuguuuauuuaauguuuuuacacuacucuaugguuuucagaacagcuuacauauuucaaaaucauguauacagcccaaagaaauauagaaaauuaauuugggagguagcuuguaagagaacaacaaagagugagacugaacuuuuuuuugauauuuauaauuauuguaucaauuuugaagaagaggaccuuauaaguuacuuuuuuucugauaugaauguuuuucagaauuaucacagucaaaggaaccagaaucuuacacucaccuaaugucugugccacccuccaagcagagccauuguucauugaaacaauugaugaaugacuccauggauagaccaucuuaauacacaccauuucuuaaaugaauguaaccugcucccuguaggcugagaaugaugacaaucacucaagucaaauaguuuugauuauagaaggaaauauguauccaaauaaucgugccugcaauucauuccuuggugcagcagaacugucaacucuuagcuuaacuacuauggagguaaaauccuuuggugaugugagggacauugaaguacagacuaauuacaaugaacuccaauaucuaaaaauuguucuuauuuuggguuuguaccacaguaagagucaagauuuuaaagcucuacuaaaaacaaaacaaacaaguaaacaaaaugacuuuauuuauguucauuuaauaacaugucgaucauuuuaugauugguauaaaaauauauauugugcugaauaugauaaaaaauuaguucacuuaaaaauaaaauaaagacucacuauuuuaauugccucuaugcagcauuuaucauauaugauaucaaauuacaucuaauuuauuauucaaaacuauacugguuagcuuucaaucugacaguuaaagucagucaaccaguguuucuuuugugauguacuggacugauuuauagagacccuucugggauucuuagcuuucuguguggucaccagcuaaugacugucagcucuguacaaaggacacacuaccagaugccaggacaucugucacagcagcuaggacacagagccaaaucuauucuugucuugauguaugacacacaauauguacaaucaguuuuguucauuuugaaaguauucuuuaauauaugcuacagacaagacccugcaggacagugaagaccguacgguggcagggggaguggaaaauaacauaguauugggaucuugagacuaaagcaauuuucuucacaagauucuuuaugaaaucagcucugagauuuugauuuguuuuggaauuuugauguuucugaccuuaauggagugauguauuagucccagaauaggugaaaaugaagguuaaacauuuuuggcaucaacuuaaaauacagaaaaccucuuuugacuucuugagucuguuuguaugugugugugugugugugugugugugugugugugugugugugugugugucugugugugugugugucugugucugucugucugccuaugcaucugugaaaaggcaaggagcaguaacacuauccugaauuauuacuaauuuauuuaaagguaaaagaauaaacaucauguaaccucucuuaauaaaucucacauaaagugguuuuuuuucuaacaauagauucacauuuuaauucuuauuucaauuaaagaacuuuugaugcauuaagcucaaaaccauaaacaugucagauaacagaacauuaaguucaaggaauauccuacacucuuuaguucuaacuaguuuugaaguuauguuccuuuuucucauagaucaaauggugaaaaacuauaaaauaguacuauuaauauacauaugagagauuugguuucugaaucuaugccuuuucuccuacucagcaugucuucuaacauuuuuuggcuauuuuuuuauugguuauuuuauuuauuuacauuucaaauguuauccccuuuccugguuuccccucaggaaaccuccauucuaucuucuuucccccugcugcuaugagggugcucacccacccacuccugccucacuguccuagcauuucccuacacuguggcauugggccuucauaggaccaagggccuccccuccuccugaugcccaauaaggucauccucugcuacauauguggcuaaagccauggguccaaccaugguugguguuuuagucuuugggagcucugggggucuggcugguuaauauuuuuguucuuccuauggaguugcaaacucauuaagcuccuucgguucaucccuuaacuccucuauuguggucccaaugcucaauccaaugguuggcuacaagcaucuacaucuguauuggucagguucugucagaaccucucaggagacagcuauaucaggcuccugucagcaagcacuucauuggcaucagcaauauagaaaaugugguuacauuuacacaauggaguacuacucagcuauuaaaaacaaggacuucaugaaauucuuaggcaaauggauggaucuagaguauaucauccugagugagguaacccagucauaaaagaacacacauuguaugcacucacugauaaguggauauuaggaauaaagcucagaauacucaagauacaacucacagaccacaggaaacucaagaaggaggaagaccaaaguguggaugcuucaguccuacuuagaagggggaacaaaauaaucacugaagguagagggugggagggacuugggaggaggagagaagggggaagaggaaaaaggaggcaggauccaaaaugggaggagacaggggagauguaguucagaugacaggucaggaguuugaacagagguguguagcaaugggggauggggaacuggggauauccaccacaaagucccagaugccaggaaagcaagaggcucccaggacucuauggggaugaaauuagaugaaauacccaacagaggggagagacaaccuguagagaacacaucugagguuaggcauggcccccauuuaaggauguggcuaccuacccaucucaaacauuuuaaccuagauuuucucuugucuaaaggaaauacagggacauagagugaaacagagacugaaggaaagaccauccagagacugccacacuuaggaauccaucccagaugcagucuucaaacucagacacuauugcuaacauuucuuuuuuguuuguuuuguuuuuugcuuuuuguguuuucaagacagguuuucucuguacagcccuggcuguccuggaacucacuuuguagaccaugcuggccuugaacucagaaauccgccugccucugccuccugagugcugggauuaaaggcgugugccaccacgcccagcucaacauuucuuaacuaugaaaaaaauaacguuuuuguuaugcucaacagcagguggcagcugacaaaguauaauuguaugugguccugaaacauuguaaauaauuuuaauguuauuauaacauucaacaaaaacacccaaauuauuuuuccuucuacuuaaaucucaaaauuaugcuaccaucucuaaucucaacacaauaagugaauucugaagcaacuaagcuagguggggcauuauugguuuuaguuuagaaagcacgcacaguuagucuacuguagcagugcccauuuguggaaauuucugcuccuuucuucauagacuccuggguggaagaaaagugagaccucaacaacagcacuucaucuggaacucaacuuccagaauggagauugaaaaauauaaaucaccaaaaccaaaggggaguuuuaugucagugaguccaugagaguauaaaugaccacaaugacuuaagaaauccucauagaagguaggcaagaugguuugguauauaaaggauacuugcugucaaaucugauuuccagcccuggagaccaaugagugaagaagagaacccucuucuaccagccaguuguccucugaccucugcacaacacacacacacacagggggggggggggagggagagagagagggggagagggagagggagagggagagggagagggagagggagagggagagggagagggagagggagagggagagggagagggagagggagagggagagggagagggagagggagagggaaguguaagaaauucaaaagacauccaaauggguugccagaaaaaaaugcaguuacguuuguauuuguaauaaacaacacuauuuuuguacuucagaauaaauagcaggacaucuagcuauacugauaguuaauuauuguuuauucgaaauucacuuuuaccuggacagcuugcuaauuucuuugacaagucuggcacgcuuacaucugaggaaagucuaccauucuaaaaucucucugcaacuugccugaaauccaguuaacucacuuuagcccuucagcuuaauauaaauugccauuugaaauacacacauaugucugaggcauacaugagcugcucaugcaucaccguaaauuaauuuaaagaaauuuaaaaagacugaugacugauuucuucucaauaucuaauuuuuuuuuuguuaaagaaaauuccugugaagcagcuguaugugcaaagguugugaggcugacuaaaacuuuaaaaacuguggaggguaagggauguugcugaaccaggaagcuuacuucaaguuuccuuggagcuaucuuuuuuuuuuuuuuuuuuuuuuuuuggagaguagauucuuaaaacauccuuaccacaauauauccucccuucacucuucccaucuccucccuacaucuucuccccugcauauccacucccccugcauuucuucuucagaaaagaacuggccuucaagagaguacagaagaaugggacaaagcaagauacaauaagacaaggcaaaagcccgccuauggaggcuggaaagggcagcccaauaggaagaaaagauccccaagagcaggugaaagagucagaaacauacgcacucccaccauuaggagguaccacaaagacaccaaacucacagccauaacacauaagcagaggacccaguaaggaccuacccaaauaucaugccauuuuagucucucugagccccugugagcccugcuuaguugacuccaugagccaauguuuauccucucugacuccuaccaucuuuacccacuucuucuaguucugagggguucuccuagcuuugaagagagagauccaauggagaccuccaauuuaaccucucucucaacacaauguuuuacucuaggucucugcaccuacuccuuuggggccauuuuucuaccuuaaggagacacuccuugcucaacucuauaucaguccuaacauguugauaagcagauuuuaaaaaaauaaauaaacaacaacaacaacaaaaaaaaccaaacaaaaucacuaccacuacaacagcaaaaccuuuguaauguauuaacaaaauuuuauucccaacuaacggaagagcucaguaguuaucagauaacaucugaggccuaucugccuggcugcagucugcuucucugauauacccaccaaugaauuuuaaaauuaccuugauucaugacuuuuacuuuucugcuauuauagaacuuggugaaacaguauccacauuggaacauggaauuaggguaacuuaguacccuguuuguaagccauggccacucaaauuuggcuccaaaguaaacaaucucuuauucccuuugaaugguauauuaguugcuuuucugcugcugugauaaaacacugugaccaaggagaguuacagaaaagggaguuuauucuaguuuaugguuccagagaauuagaguccaagaugguggaaugaaaacaagggagaugaagaaguaacugagcgcucacaucuugagcaacaagcaggaaugacaagcauuuuuuguuugcuugcuugcuuuuggcaaaacaaaacaaacaaauaagaagcucucaaagcccagucccaggaacauacuuauccaggaaggccauaccucuuaugacuccccgagguccccaaguggagacuaaucguucaaaugcuugagguugggaaguguaucucacccaaaucuucaaaaggugggagcucuauuuuuuguaucaauguuugccaugacuaauucgggucugaggauauaggagauuugguuugguuggucugguuuugaaaggggaagaacacaggauugucugugaaauguuaauucaaacucauuuuaacgguucuguucuuauaggauuaucaugugucagggaaugcuacauugaaaacaugaguuuggagaaaugaaaugagauguaaguuaaaagauguaaaguaggggauauauagggcggcaagugugagagcaaauguguaacaugaggacaauaguuaauggaauggugucauagucaagauuuuauaaagaguacuuagcuggccuugucaaaaaaaguaccuauauaaacugauagacacauuuaucuguuucaugacagugaacaauuuuaccauucuguacguauccaauaagaucauauugaugcuuuaaauguacacaguaggaacuacuugccaucaaagaaagaacaauaaguaugacaugauagagcauaagaaagcucuuugacuccauaauuuaacuugaaauaugaagcccucagaaguagagcuguuguagauuaugagaaauguuauaacaggggcaauugauuuucauaaacgauggagaaaguauaauaaccuaguaaacagguauaauuuauuccauaguuugauuuuuuucuaagaggaugauuucucuuagaauaaguucucuuuggagaaugggcaguuauuauuauugauguaauaaaaauaaaauuacucuguguuucuggaggagaagaugaagaagaaaagggugaagaaagaggaggaaggggaaaaggaggaggaggaggaaggggauggggggaugguuacaaggggcaaaauguucacagugaguuuaugggucugugccuuuuuuuuuuuuuuguccacauggaagucuuguuguccacguuggaaaugcagauuucucucugcuccagacauaauggagaugaaugccuauaaguaagagcucugucauuaaacauggaucagacauuccccaggcacaaucuaauagaaaagaaaaacagaaaaacagaaaggagucagaauagggggaucaaucugaagaagaguggagugaaacgguuuggaaaucgaaaaggcaacacaaagaauaaugacaggucagagaaggugacaggcuuaaaagauacaaccaaauaauuccauuuucaugacuccauggugaagaugaaagaagcagaagccguuucaaaagcuaagccaggcaagagacuugggcacugaccccaaggacagucucacagcacucacagguuucaaguccaucucaguucuuggugagacaguggucuuccauugcacaggucuguggcagugaaaauuccuauuuagucacucuaugggaaccagaguguaggcucugaaagaucuugaaagucuauugcuaaaaauugagcuaagaauggaaggcuacgaauuugggaaggagaacuuaggagagcacaacaugggaggaguuagaaagaugagaaggaaggggaacuaugcaaaugcaguauucaccuacaucauuuucaaugaauaaauuuuauuuauuuauuuacuuauuugaagggauuaaaaacaacaacagaauccugagauaaacagggaaagaaagcgcgggggaaaaaccauaacccugagagucuggauuuggccugccacagaccuagaguagaagaggcccaggaaggacaagaugucccauggagagcaggaugcccgcugcugauaaacuacagguucaguuggaagggagcucaguuuaggcaggaaguaagugcauaaggaaagaaagcccuaccauuaguaucugggaauaguucucaucaacugagagcaaaccuuguauggagaacugagucugaaaucaguggguagaugagcagcaugaaccauuucuuugccugauggccacagagccugagaacucaaguuccagccaugaaauacagagcuauauucuacuaguaggcucauugauaaacuuagaaguucuugcaugcaugaagacaggcucuccaucuaucuagaaaaugucuucuauggucacuuagcacaugcccagugcacuugggagauaccucacagcuaagacauuggcuaucucaggggaugcaaucuggauugucucaguggggugacagcauuuucccagcacacagacuuaaaaccuguguacucugauauacaaagggaagccaccaaucugaaaacaacucugguaaccagcagagaguguccaacagagcaucaggaaacuuaaacuacaggcaagacaucagcccacaguuuaaagggcuaugauccccaccaugucauguaacugguaaucuccaauuuucuaggaccuagaaggaauccauuccagcacuucgcacacacaccccuucuuuuuaacucuggggauucuucacuuucccucuugucauuguuaagcuguuagaggcacuuuuauuguagucuuaaaauuugucuuuuauucucaucauuuaauuaucucauuuuguuuaugcauauuuuucauuauuggguaaucuugauuuuuuuuuccuuuuuagagugcuucuucuuauuccuuauccuuuuagaaguauucugaucuuaccuuuuauuauuuuaacuggaauuuuuaaaaaaaauuuuuuuucuaacuucuuacccuguccuauucuucuuuaugauauucaucuccacuugguucguuuuuuccucuuuaaguggucuucacaucucuacucccuuuucugucuccuuccuuaucucuuucacuuacugcauccacauuuaccucaacuaaagaguaugacuagaucuugaaugguuugauguuggugcuguuagagcaguuugcucucuccacucuaacuggaacuggugaccaaacucuccagaguaagcugcuuagccccaugugguggaacauaacugugguuguagaaccgagggggcugaggcaggagcuuagccccgugugguggaacauaacuguaguuguagaaccgagggggcugaggcaggaggaucgggcuuucaggucacacuuugcuacauaguaaguuugcagccagccuccuugugagaugucuccaaacacacagaaacaaaagaggaaaaggagaaaaaaaugacugagguauucaauaugaaauacucaaauaaaacuucaagagaugggacaaaacccaaagguauaagaaguguagcagagaaacucaagaaugugucaaaggaaacaguauuucccccaaaaggucauaauucucggcuucucaaaagacauggagauuuguuaacaucuagaugaagacuucacaaguuuauuugaucaaugaauuccgagaggauacaaacaagcagaugaauucacucuuguauuugcggaggaaagucaacaacacagaagaauaugacagugggacugaugagcaaaacucuaagguacacagaaaaugucagcaacaugaaagaaagauucagaaggaaaauugaguuuuuagggguuuuuuuuguuuuuguuuuuaaaugaagaaaccaaaagaaaacaaacaagccauuggaaaaccacacgacaaaugauuuaaugaaggagaagaaggaauauuacugaaacaacaaaaacccacuaagagaacagacaauaacaaagcaauuuuacaccaacuaaaaaaagaaacaaguaacaaaauuauaggaauuaguaaacaucucucaagaagaauaacauuauauguauauagccagaacucacuaauuaacacagauuggccaccuagaugccuguaugaagacaaauuaacaacaacaaccacaauaaaaacauugacccuguuacuaucuccaaaaaccacaccuuauggguaaagucagccacuguuggagaaugagacaaucuaacaagugagugaaaucugaaaagaauuuagcuguccuacauuuaauaagguagacauuaaaacaaauuagacagaagacauaaagaaggccaagugagcaaugaaagggacaacuaauuaagaugguauauuaauugaggcaggcauggugucacacaccuagcacacgguagacagaagaggccaaucucugugauuuugaggccagucucauuaauaguuccaaaacagagcuacauggaaagacugccucaaaaaggaaaaagagauggaggaggagaaaaaggaggagaaggaggaggaaggagaagaagaagaagaaggagaaggaggagaagaaggagaagaaggagaagaggaggaggaggaggaggaggaggaggaggaggaaggggaagagacaaaacaaccguagauacacaucaaauuuuagaauucuuaauuucauaaaacacuaauggagacaaaauuucagauacacucaaauaauaauaguugauaauuacaauaucauacaauaauuuuuagaugcauuacucaagcugaaggucaauaaagaaauuuaaaauauaaauaggacaaaaugacuuaaaggauauauagagaauauucaauccaacauauguguuuauaaaagauacacauuguucucagccgccuauggaagcuuccuuuaauagguaacaugcuacauggcaaagcaagucuuaaccaauauaaaagaaucaaaauaauuccuuacgucacgucagaucacagaggaggaaaaugagaaaucaacaguaugagaaacuacagaaaauacagaaauacauuauacucuuuuguaugugugugguauauaugugugcauauguucaaguguauguguguguacacuugcauguggauguguaaguccauucauguggaggcuagaggucaaaguaugugugccaggggcucuuucuuagucucuugcucaguuuuuaagacaagucucuuacuaaaccuguggcuuguugauuuggcuagauuggacgggccagcacauucccagcauuucccuuucucugccucugcaaagcuucaguuacaggcaugugcugccccuuuagccauauuauuuagugcuguggauaugaacacagguucucuugccucuuagacuuuauugacagccucuaaaaaggauacuuuugaauaacaaguuggacagugagggagucagagaggaagcuuaaaaauggcuggaaucacaaguaaaaacacacccuaagagaaucuuuggaauagaaaaagcaguucuagaaggaaaguuuguagcucugagugguuauauuaaaaacucagaaagagcugggcaugguggcgcacggcuuuaaucccagcacucgggaggcagaggcaggcagauuucugaguucgaggccggccuggucuacaaagugaguuccaggacagccagggcuauacagagaaacccugucucgaaaaaaccaaaaaaaccaaaaaaccaaaaaauaaaaaaacaaaaacccaaagcucagaaagauuucuccacagugagucacaacuggcuaagguauagagaugaagaaccugcagaauucucagcccaaagggaacauaauuacuguaacccccaccccucaaggcuuagggaugaacacagaagagucuguggugguggaugccgaccacacgaagcauuaucaucugaacacugcagaggcgcuacacauaggaacucaguucuuuuucggcggaguauacagguauauauacuguauauagccagaccaaaucccagcagggagaagggaguugggcacaauccuagccaaacucuggagugauugacaauuguuagcugcgaguauaguguaaccucuccuuaggugaguacucuccaguagaagacaacacaucaaaaggcuuugcaaggcuaaaaagacaauggguacaaaguuacauggauaaagaagugguguugaacccuucucaauagucacaaauaauauaaaauaucuuggcaugacucuaacuaaggaagugaaagaucugugugauaagaacuucaagucucugaagaaagaaauuaaagaucucagaagauggaaagaacucccaugcucauggauuggcaggaucaacauuguaaaaauggcuaucuugccaaaagcaaucuacaaauucaaugcaauccccaucaaaauuccaacucaauucuucaacgaauuagaaagagcaaucugcaaguucaucuggaauaacaaaaaaccuaggauagcaaaaacucuucuuaaggauaaaagaaccucugguggaaucaccaugccugaccuaaagcuuuauuacagcgaaauugugauaaaaaccgcaugguacugguauagugacagacaaguagaccaauggaacagaauugaagacccagaaaugaacccacacaccuauggucacuugaucuucgacaagggagcuaaaaccaucuaguggaagaaagacagcauuuucaacaaauggugcuggcacaaugggugguaauuauguagaagaaugcgaauugauccauuccuauuuccuuguaugaaggucaaaucuaaguggaucaaggaacuccacauaaaaccagagacacugaaacuuauagaggagaaaguggggaaaagccucgaagauaugggcacaggagaaaaauucuugaauagaccagcaauggcuugugcuguaagaucgagaauugacaaaugggaccucaugaaacugcaaagcuucugcaaggcaaaagacaccgucaauaagauaaaaaggccaccaacagauugggaaaugaucuuuaucuaucccaaauuggauaggggacuaauauccaauauauauaaagaacucaagaagguggacuccagaaaaucaaauaaccccauuaaaaauggggcucagagcuaaacaaagaauucucaccugaggaauaccaaauggcugagaaacaccugaaaaaauguucagcauccuuaaucaucagagaaaugcaaaucaaaacaacccugagauuccacuucacaccagucagaauggcuaagaucaaaaauucaggugacagcagaugcuggcgaggauguggagaaagaggaacacuccuucauuguuggugggauugcaagcuuguacaaccacucuggaaaucagucuggcgauuccucagaaaauuggacauaguacuaccggaggaucccacaauaccucuccugggcauauauccagaagaugucccaacugguaagaaggacacaugcuccacuauguucauagcagccuuauuuauaauagccagaagcuggaaagaacccagaugccccucaacagaggaauggauacagaaaaugugguacauuuacacaauggaguacuacucagcuauuaaaaagaaugaauucauaaaauuccuaggcaaaugguuggaccuggagggcaucauccugagugagguaacacaaucacaaaagaacucaaaugauauguacucacugauaaguggauauuagcccagaaacuuaguauacccgagauguaagagacaauuuguaaaacacaugaaacugaagaagaacgaagaccaaaguguggacacuuugccccuucuuagaauuggaaacaaucacccauggaaggaguuacagagacaaaguuuggagcugagacaaaaggauggaccaucuagagacugcaucauagagaugccagggauccaucccauaauuagccuccaaacgcugacaccauugcauacacuagcaagaguuugcugaaaggauccugauauagcugucucuugugagacuaggccggggccuagcaaacacauaaguggaugcucacagucagcuauuggauggaucauagggcccccaguggaggaacuagagaaaguauccaaggagcuaaagagaucugcaacccuguaggugcaacaacauuaugaacuaaccaguaccccggagcucuugacucuagcugcauaugaauuaaaagauggcuuaguaggccaucacuggaaagagaggcccauuggacauucaaacuuuauaugccccaguacaggggaacgccagggccaaaaagugggaauggguggguaggggagugagggggaggguaugggggauuuuugggauagcauuggaaauguaauugaggaaaauacguaauaaaaauaauguaaaaaaaaaagaaaugguguugacuuacaaagagccaagagaggagucaaauauggucaaaccacauuauuuugcaguucucaaagaaguaauaaaaaaaaucgaacacauuuccuaauauuguacaucaagcacuuacaaaaguaagaacaaaucauaugcccuaacaagaaacaauaauaaucagugugaaaauuagagagaagcuuaaaagcaauacauaaaauuaauaaaacacugggauaauccuuuuuaaaauuaaaauugacaaagauaaagaaagagaagauucagauuagcaaaauuauaaaugaaaaagggaaggccauuucaguuucuaacacaauuuaaagaagcauuagagaauauuuuaaaaagcuguacucugaaaccuggcuucuaauuuuagcagaaaccucacauagggucuccaaagccaacucugagccugguugguaaagcuuucuguccuugcuagucaguuucuuaucauuaagcaaucugggauucaaagacuuuagcagugaauauuuccacuucagugguugucuuagucacuguucuauugcugugaagagacaccaugaucaaggcaacucuuauaaaaggaagcuuuuaauugggggcuugcuuacaguuucagagucccuuaucaucauggcagggagccuagcagcaggcagacaggcaaggcacugaagugguagcugagagcuacauccugauuuacaagcuggagucagagggagaaaagaaagaggggaagggagcaagggagggagagagagagacagagagagacagagagacagagagagacagauauauauauauauauauauauauauauauauauauauauauauauauauagagagagagagagagagagagagagagagaaagagagagacagacagacagacagacagacagagaaugagaguuuugaaaccucaaaucucagccccagaucacaaauccuacaacaaggccacaccuccuaauccuucccaguagucuaccaacuggaaaccaagcuuacgaaccucugggaccauucucauuccaauccccacaaagggcuuccaccuuguuaauuuuacuaucaacgaaauugacuuuugacuuugacaauugauuuuguauacaaagaaacucuagaaaagaaagaaaacguuaagucauaccacuaaggaucaggaggcagcccuggacagccgccacagcagaaaggcuggcccuucuauguuucugugaaucauagcauaugcgcuuguaagaagugaaggauauuucuccauucaauuuuauacaugacaaaaaauauuccuaccaaaugugaaguggcaaguaugaauuuaguguuuaguucuccuuaaacagucaccagaccuugaggucuuccucagguuaccacagcuuguagcauucauuaagcagaauggaggaauuuuauuauaaaauguaacuaauguauuauauguuauuaucauuacaaacccuuguauguaacccagagagggaauacacacuauggaucugcuccaacuuuuuaauaaguaaauuuuaguuaaagucuauuuaaagcaaacuccuaagacauuaaccagcucccaagagcugacuacuacauguuauguuagcuuguccauggugcuauuuguuacucuuacaggauuucucuguguagcccuggcuguccuggaacucacucuguagaccaggcuggccucgaacucagaaauucgccugccucugcuuccuaagugcugggauuaaaggcgugcaucaccacgcccagcuacuauuuguuauucuuaaauagcuaaccacagcauaaaauuuuauuuuccuaaaauuuacauuuaaaagccauccaacuuaccaaagugauuucaaaccacaauuacauuuuaucucaacuaccagcauuuuauuuagccaggaucuacaugagacacauaucaugaugugcuauguacaucuuguuauacaguguuauauugauaacaaaugucaucaauauaacauugaauuaaucuuccauaauuuauggggaaaaaaggagcagccuuacugaagggcaaaguuauacaacagcuuuacagaagcugcaugcgagugcaguaccgggacacgggcacggacggcggcacuauaaccauuuuccguggugguaaucuugcuuucaucugacacagaaaagagaccgccguuuugaaaacucacagaacuagccucacgguuuugugaguccauugagcgcuggcugcgaagaacgguguuuaacucgagaaaucauugaacaaguuuuagaaaauaaagaugcuuaugacaauuucaaacuugaaggucuccaaagaaggacugagauauuggugagaggaguaaagagaauccuggugcauuuauuucaugcuuccuucuguucgaagaucauuuugagguuuauaaaagguggggugauccaaaaaucuccaggcugagaguccuggcugaggcugugaacugggcugcagagaaagggccacgccucccuccucugcucgcauuacucagcagcuuuucugcauguggcuggcugcagacaaucuaaacccuuccgcugucgcuccccccuuauacuguucugccaaaaggaaggcagagaggaaaucagcuacggggcaaagacugaauagugaacacauacagcaauguccagcgaguuaccuccugugucuuauuuauuuauuuauuuauuuauuuauuuauuuauuuauuuucucuaccgauucgcuaaaaucauaaagagaaugcuucugucugacaucuuggaccaaaaugcuucccauacugcacucuguaacuuuucaauugaauauuaauaacuaaauggauuuauaauccauuauuucccuuuggucaccuacucaucacggacuaaacgaaagggcaaugccauuaucuuccuggcccaacucuuaacauacgugucauugccaaaucaaaggaaaccuuaccacugagcaauucacagaacuucgcuuagcuaauaugcuuaaggaaucugagaauguccuacuaaauuuuaauugaaugaagaccuuuuagaagaauuucuucuguagauaaauaaaccuagagcuaagaaaggaaagcuacaucuacaggcuccaucucaaagcuaucuauaucuguagucaguuuucaggguuccuacauagagaauaaguauguguugaaaaaauacuacacuaguaagcagccuuuacaucagugguucucacccuguagguggaaauccuuuugggauuagaaugacaguuuuacagaggucaccuaagacuaugaaaaacauagauacuuacacuaugauucauaauaguagcaaaauuacaauuauuaaguagcaauagaaagaauuuuagaguugggagucaucgccacaugaggaacugugcuaagggguugcagcauuuggcaggcugagaaccacugcuuuauacuaccaaaauuuuggaagaaagggagugaguucauucauggccaaguacaauugcuaaagauggagccaagauuaaacugaucuaagcaagagaaggaaguauuucugucuuggagucuuagcuucucagucauggacauuccuugaugguaucuuuccacuuagaauauuuaggguucugaacccuauuucugaaugcgauuucuugacuuuucuuggcuucaauuccaucacuucugaagucuauaaauacuagagcccuauauagcccucuacuccuuuaaaauacuguccucaauggucgcuugcacacagaaaacucuacauaggccacgugacucuuagcuuaguuagcugagaaaaucaggaacucuuucugagcaacacuaaauugggcugagaaugagucagaaaagucaaggaaacaugaacucaaagucaucuagaguugaauucugggaagugaagcuuagagcaagcaaaggaccauaacaacaaaagagaggccuaaauaaauagauagauagguagauagguagauagauagauagauagauagauagauagauagauagauagauagauagauagauagauagauagauaaagcaaagcaauugucgagucaccaggauaaagaauagguucaucugcuuauguggccaaauucucaggggcacuucugccucugccuuagucguauuucggcucuuggcucucugauuguaugcccacuauuaaugcaccaauuacuuauauuaaguugaaauaagcucuuaauauaagucuucuguggcccaaacauaaugugaaaaucauuuucaugucacacuuuaauuacucauaauucuaucuuuguuucuuuuuauuugugagacacagucuugcucuguaaccuaacggccuguaauccacuuuauagucuaaccuggucuuuuaucacccugccucauuuuccuggugcugggauuacaggcaugagucacaaagcuggguagauucuucagggguuuuuuuuuuuuucuuuguauuuuuuaauuuauuuucuggcaaucucacucguguccauuauguguguugaucauuuuuuaucauccuguucgcccacacccaaugaacuucuuauuccuaauacauucuuuccuaguuucaugucucuuuguuggaaggucacagacugaguguaauuaaagcuguuuccaugaacacggcauuuuguggaggaugguuacuggagcauggacaacugacaaguggcuucagcauugaaugaaauaccugcuuuaccacaguggcacuuaagugcaugcugauggcccccuugggugaggguggaccuccuaccauaugucauuaaauaucaugggcuccaucuuguguaacuaaccauagccauugugacuuggcuauagcagagucauauccaggaaacaagguuuucagaacuccuuuuauguuauuucuuuccuaggagucguugcucauagaggccccaguggcaggcccauaaaacaguaggagcuauagccaucgccuuugcuugcucauuagaaguggaugauaggacccuguugcugaagagauugcagucuucgguuacagaaaauagagaaaucgaggcgggacugaccuagaagcuuccucccuuuugcuuagcauuuauagucccagaaagugcuuuuguaagcugcuagugaagaaagugaucaauggccuaaaucacuugugaccaaccuaccaggacaauguaccuacuggugcaauaaucacagggcugauuauuaugaggguaaccaacuggucuuugauuguaucugaagccugcuucacaagauggauucaugccuaucacuguuaagacugguccuaagccuauggccagggaauucauagguacuaaugagggaguuagaacuguugcuuugcuaaaugccaugcugucaaauuacuucccaaauacguuuguuuaugcccauagauagugcugcucucaaccucggcuagagaaucuucaucuuguaaugggcaaagguuaauauggucacucauaaauaaccauuucuuuuagaguaaaugacuuugagugcucaccccuaaaugaaucaucucuaccacuuucugaguggcucauggaacaugguagaaggauuucuauguuuuuacuauagagaauaauaaaaaaguucaacaaaaugaaauauuauaaauacuugagugauuugcccuaugguauaauaauuuuucaauacuuguuuuaagucuggaaagugcucuucuacugauuuaaauuacuguuuuaaguacugaaacuaaauaauggcacauacauauggaugacauguggaaacaauuugcauacugaguaaaaauauuaauaaaauaacauaaaguggaaaaucacucaucuuuuaaaacuggggauauugcuaaauauagauuguguguuuaggaagcccagagcugugggccugauccuuagagccacauuauaaauaaaguuaaaguaaaaaaacaaaaccuagacauucaguagggagauguuuuaaaaccuuggugaccuuguagguaucuuucaaaaauuguaucaucccaauuauucauauuaagaauauuuuuuaaagugccacagguaaaaaaucuuuucuuaaaaaaagccuuuaacauaaucucuagaauuuggaucaacaacauugcugagauauuaaaguuucaugguacaaauuaugacagaaaaguuugaccaaaaauaaagcagccauuguugcuacaguuuaaguguaagaauacaauagaaugggucuuggagagugacugaauuuuacaguuuuauaaucuuuucuaaugaaguacacaccuuguaaucauucaauaauuugaacaguucauaauauuguuuaaccaauuuagacugcaaagaccucggucugacagagcaagucuugaccugcuuaacauuauguuaugcuagucauuuuaaaaugagucuuuauuucccauagaaggucaguuuuuuuacauuauuauauaaucuuuugacagaauaacaaauaacauucugaaugucucauuucuaaauacaaaacaucuuaguauaaaauuaugcauuguuuuaaaugcuuggaaguagguccacauguagaaaacaaaguacguaugauaaaaaauaucaaaauuguauauucagcaggcauauuauuagaaauuguaccacccggugauuuauuaguuacuaggaaaacuguagagcuaaaccaaaaaguaaucauuaaauaacaaucaaugagucaaccaauuguuaaagaaccaaaucuauaggcacauauauauuacaaggcaugggguaaacagagauuugcagugugcucuccuucaguuaugaacuguacugcauaggcugagggaucaaucuauggcaugccaugccucuucacuuuccccaucagcuguaaggaagcacaaaggcgaauccgggccagcaaagaauaaugcuugagcauuugacauuucaccacuuccuguagcuugcaugcguuuuauuacacucuuugacacaauauuugauuuuacaaguuggaucaaguuguuuagucagcaaaacaggaauaagcaaaugagauucuaccugccuacaauuuccguucaucuccagccgucugucuguccaccggaaugaaaacuggagcauacucacaucacaaggggcacaugcaucagcgugaaugaagcuaccauaccucccuuugguuuccucaucuccaaaauggaaucuccuuuucaguauuuuaucuuuacugauuuaucauaagagcuguaugauucuuaccuuuuuuguuuacuuagcagagacaucagaauaguagaaggaagaugaacaaugagauaaugcugauuuuguauacaaaguacaacucuuaguaaaaaauguuguugcuuucagugguauaacaauguuauuaaaguuuuuaauccaugucuggcuuuuuuguuguuguuuacuuuuaucugucuggggagucuugcuaugugacagacuuguuuagaucugacuauguguccagucuggcacugaacugaacagugauucccuugguccucuuaccucgaacccuaaguagucagaguuuacauuugaggcaccauaccaggauuugcguuugacuucauacacauaacuuuaacauuuuaagauggggaaaugcaacaaaauauguucuuuucauaagaagagaguuuauagcucuccuauuccugucauuaaauggaaauaauguuuuguugaugauuuauuaagcaaacacgauugaugguuccuucaaguuugugacuggcgucucaacuguguuauuauuuguaguaguucuugaauuaaaguguaucagucuacggaugacauuccaaucuucccuaccucgauggaccaguuuauaaauuugaaggcugaucuguuucauguuccuacuuuucccugaaaguauucauaccuuuuuacgacauaccacuuacgcauuugcuuuucauuucaacauucugacuaaugguacuuauuaaacagcuacagucugguucaauuccugaagauguuaguacaucgccccuggaucucauagaguuguuacuaaccaaguagaaccucacagauacgccugggacaguccuaacacagagaccaauaguuauagaaaaucaaacucagguuugucacgagggcucuaagaaucuuuauuguacccuccagcuuugguucauugcuaauacaugcuuuauaggcaaccauaacucccuaaagaaacauacauagagugguauccaauaaaauuaaaguuuuucaaagagguccuuuccucaccaaagccuguggacagccagugugcauggcuaccaucagucgccacugaugauuccccuugucucauggagcauucuccccugguuucugaugaaaaaguugcgaaugggugagagaccaugccucuuaaaagcauagguagauauaugauagcugaucaauagauaaguagaugauauauugauagacaacagccuuccuaaaguguggcuaagcacuauuuauuacuucugucuugguccacauguuuauuuacuuuaucucacaaggaaaugaaauugauccgacaccaccuccacucacaaguuauccuggcuuuuacucugugcuguucuggaugacugucaauguaaauacaugagguuuguguugauuuuguuuuguuuuuguuuuuuuuuuucuuuagaagaaauuuuaagauauuggaugaagaugaaagucguaaggcuauuuaaccucuuuucucaaggagaauauuccaaauuuuccuuuuccuagaguuagauauuaacuuuuaaaaauuccauuaaccauuuagauauaaaucucaacaucuuacauucauuuuauauauuuuuaaaaaucggcaaaugaaugacaauuacauuuugcuuguauuuuaaaauucuucugucuacuuuuggccuagaagaaaaugccagcuuuuagaaaucuuuuguaucacauccauuaaucccuguuaacuugcucccucuaaauacuaguguuuguaaaccuuuucagguaucuccagauagcuggucuaaacaggaaucguuuaaaaccuuucauauguaagauuaucauauuauccucaauuggaaauacagacuguaaaaacuauuuaagauauacaaagcccuuacauucaguucuugauuuuaaguagucuuuuagaguaccaguagauuagaaaauacuuauugcuaaugaagugcucuguagaaauauuuguguucaauucacauuauuuacauugcuuuucucucaacuguuuuuuauuauaauuuaugaugugaaugauaguguauucacauguacauauauguuuauuagggguaggguagaguuaccaucaagguagagaauaacaucuuuucaguuagugauuuaguacuuguaaaacuucguauucaauaaaacugcauuaaucacuaucauuauuagucuauaagcuuauuuauauauuuuacucuugaaaccauuuacuagcaaacuacuuuuccauuauacauuuuaagaaguugacauuuuagcagugcuaucauuuuuuuacucauaaaauaaaaagcaggauguaauaaugucaaaaauuggaaugacuguaugccuaaaugucacucagcauggauaaccauuaaauugacacacccaucuaccuaagaaaguauugaggugauuaaaccaauaacaugaaaauauugacacuuuaaauguagaacauacggaaaaaugauguuacugagucaaugcauauuuauaaugaaggauuucacuuaagacugaagaguugcauuacacucugcaauauauuuguugauuuaaagauaaauuauuaagauuaaauauaacaauuuauguaauuccaaauauuuuaucauucauaguaaaagauacuuuuuaguauccagaagccauugaauuguagagacauguuuuguuuguuaaguccgagcaaaauuauuugauaacguaccauuuuaaauauauauugugcccauagaaauuaggcacugagaaaguaauacucaacgaaugaaauuucagugauuuuuuuuuuuagagcuaucuauuuuguaggccaugcagggcuuguauacauggccugguuuaauaauauuaaaaaaaugaagcaguuugaagaacugcuuaccauguuggguugggauacguaagagucuaugugagugugugagugagcguauguguguguguguguauguaugugaaacacacaacuucugcuuugaagaaagacacggucuauuaggagagacacacuggacauuauuugcgaugguugauuuuaaugucaacuugccacaaauucacauccucugagugggaagcaccaacugaagaaugguccuggucaccuuaauugauguggggaaacccaccccggguguggguagcagauucugguagccaucuagauaaagagagacuuaguggaaggaagcuuauucacagcuugcugaccuuuccucuugcuguugaguuuacugaccaucugguuucugcagcugacuccuuuauugaugaucaggaccagugguacccaaauaccuagcuuccaccaucgacuaaggucuagguaccuuccagauaccuuccauguuuuggccacuauauggagacugcugaggcacccagccuuguggauggagcaacuacugcauugccagccuucccagugugagacagccacuguggaaguaaugugauugcuaaaguagccuuaagaaccaagcaauaacagguucugaggcucucuggugugagcuaguuguuauuucuauuuuaauauaaacuguauaaacugaguaaauuauacacacacacacacacacacacacacaggcuuuugaaacacagaaauacagaugaggaugugauuaaugauuaauuccuccaggacacugggagaggaaaauguugcuaagaagcuuccucgguaggcuugaacucaagggcaagacaguauacuaggaagcaaaggaaagggcuguggguauaggaggcauguaaaauuaauauaauguuuugauauuuaggagaaaauugcaaaacaaaaugaugacaguguuugaaaguguuugaucagugccaagcaucacuuuauguacuuggcaaacaugacuugaggccuuaagcugugauuugcaaauguagauuggaaucaagaucuuuauagaugaggaagcaaaaaucagaagacaaaauaacauuaucaacuugaucucaugugcagccagggcugaacugcaaaugcugauuugccccagucugggcuccucaaaucguuccuuggaauccuauuaguuggaacuuuaucucugcucguggcagggugccugggaccauguuuauaaauaucugcugaaugaagaauaagugagucaaucgaaccagaacucacuuugguuaguuaauuucauucgugguauuuauggagagcagaagaaagaauuccagagacacgauuugucaaaacucucuaaagaaaaugaugacacuauauauugaugaaaaugaauguucuuguucuugcuuuauuugauuuucuuguccccccacuccccaucugcuagggucucauuacagcauaguucuugaauaucccagguugaccugaaguuacaauauauucuugauuuagauggcagacauugggaauauuuugacucuuaaaauuuaauagcuaaucuuugaagaaaauuaaaauagugaucuccauuuuguagacaagaaagacaaggaagagagaauuuuacaaagagauagcgaacaccauauaacgucauagcauaaucuaguuugggaagaacggagggcccugaagcaccaugguguuugccaguaaucacuguauuggaugugucaugcugaaaugcaauacaauuaggcuggcauaaaagcuaacuucacaugaagaaauagagacuuugagaaaucucuucugaagaagcuugucuauguguagaaggaugagacguuauugagcccagugggaggcuuuaucaggaagggguagaugucuuauauacuggagaaaaaaaaugcuguaaaacuaaucaaaauccuggaauagagaguggacaugaagacugggguacagggagcccaugaggaagaaggagcugcuucaaaacucaaagacaugguguucuaccuuccuacaacgugucuucaucuguaaaucaggguuuaaauuugauaaggcagaaaacagucacaagacuauggucugcguccauccaaucagcuuuaagguucaauucagcccuauaucuuuucuauaucugaucauuucccuucaagguauucccacuuaaaagcagaguaggguacauauuaucaauggauuuaugauucuuggucaacaguucaacagagguuucuuucuuuaucucuuuguucuuuuguuuuuuucuuuguuucuuucugucuuugucugucugucuucucuuccuccuucccucuuuuccuuccuuccuuccuuccuuccuuccuuccuuccuuccuuccuuccuuccuuccuuccuuccccccuucccuucccccuucccuuccccuucccuucccccuucccuucccccuucccuucccccuucccuucccccuucccuucccccuucccuucccuucccccuucccccuuccuccuucccuucccuucccuucccuucccuucccuucccuucccuucccuucccuucccuucccuucccuucccuucccucccuccuuccuuccuucuuucuuucucauuaagguuugaaauaaauuggccacuuagucuugccucuguagauaaggaagcacagugcugcuugugugcagguaaacaauaacaccagcacccugaaaaaguauuucccaaggaauaaaaacaacuccaaagacuuuaucugugggagaguaauucugauagaaaauuagauaauuucucagcuuaugugugauguuuuaaaagaccucaaguuaaguccuaagagaaacaguuuuuaucuuaugcccaacucacauggaaaugcccuuagcaaugguauuuauaguauccaaaauguacaauucacaaauguaucaucaauagauggugacgguuaaacaagaugacacuuagacuagagaaugaguggaaaauaauguaugugacacaaguuggauaaaucucaaaaacauuuuagguagaauaauggauuauacaauaggacauaaugaauaguucuguuaugaaaugucuagagacagcaaauguucaggggcagaagguaaaaauccagauugccuuggauugaauggaagucgauauuugguauuuuugauacuugauguacauguuuuaaaaugauugcaaugauguuuuuacaacucuaauuguauuuaaaagcacugaacuacaaaaagauaauaaaaugauucuuacauaucuucaaaauuucauucauuucucuuuuuaugaauuuaauuauauuauuacugguguguguguauauguguguguguguguguuacacauaugugugaacuauggugcacucaugccaugauguauguuuguaaaaggcagaggacaacuuucagagauggccucucagauccuugcaguauagguuccauugacuucacucaagguguuaggauugcauagcagugguugcucagccauccuucugguauucuuucuuguuuuagaauuguaaugucuuaauuauuuuucuacucaguuacauuaguuaacagcaaauaagagaaugaaugaugaggaaauuauuuauuacuaugccaaacuuccuguuucacuuggagccccaauauuaugaauacuauuacaguggccuaaagaguguuauugguucagugucuuaacugauuuguuaaaaugacuacuuuaaaugugaaucauagauauaaugcuaaauauaauuuuagaagaggccucuauaauaugacauauaagacagucaacuguucuuuugacuaggaguccucaacuucaaaucgcacaagcuaagaaagugcagaagaugaggauuccagugagcugacggggugguucaauacuuuuuccaaggauuuacacucugugguuccaucagcaccaauguuagcugaccaggauggcugcggcucaagagugugacaucuagagaggcugcagcaguaauaaggaagaccuuuauuuccccuuguggcguuugcccaggugagaaguguucuuccagaagccugacugcagauugcccucauauuucauuaaugaggucaggagcccaacacuuauucaaucccuggcaagagcaaugaacucgcaaacaagcccuccccuggaauuuuuaugaaauuaaccaauuuccuaggucuucuggauauauaacccagaggggagagccauacagaauuacaguccuacuuuagacagaugcuaucuauucuauuacuaauguaggaaagaaaggcaaggucacuuaaaugucccugaacucaccacuaaucaaggucauacagaugaacuugaacauagcauuauuuuuuaaaagccaugaaauuuaagauuaucucuaacuuagaguuacauauuauaauuauauuuaauaaaauauauaucauugacgguggauauaaaggacuaccguuucauuuaaacuaauaauuauaguaauuuuuaauauuacagaguugccagcucuaaaugggauguguccuuggagcucagagaacccuuuggaagaggagguagaaaggguguaagagucaggaauggagaucagcaggagaacacagcucugugaaucaacucagcaaagcucauacaaacucauagagacugaagcagcaagcacagggugugcauggguguauaccagguccucuguguguauauauauguguguguguguauuauauauauguguauauaugauauauauguguguguaauauauacuauauauacacauauauaucacagcuuucaguuuaguauuucuaugggacuccugcgugugaaugaguggaccucugauucuuaaaccuacucuuguggcuuuuuaucuucuguuuguuugccuuguccaguuuugacgugaugauuuuuauuucaucauauuguauguuuuauuuuguuaugccuuagaagccuguucuuuucuaaugacaggcagaaacggaauggauccagauugaaguggagaggaacugggaugcggaaagaaagaaucuguuuauaauaaaagagaaaauacuacguuagucugcuuuaauauacaaugugguucuuagaucgcaagaaaaauauuaauggcacuuuugccuuaggggagagcaaacuuucaacaauacauauuugaagaauaaauaacaauuugggaaacgcuuuacuaucccucuucugaaucuaauauuaugcaauauguuaugaaagagaaauucuaauggauauuuuaaaucccuuaaaaauguucagcugaagaguccaguguuaguugcugcuagaaaaaaaguuaaaaacaugagaaaucaauuagacacuguaauucuacagguuauuacugaugauguaaaaaucauuuugucucucuucuugaaaguugaaaaggugaaguaguuuaaugaacuauaacauauguuuuggauaaaugguggcagagugaaagaaagugucaggcaaguccuaugugugcuuuucagccaaggagaaccaagcacaagagagggguggagaauggucuuaaccccagucuacgcccaagcccuucucguuuuaucuuguagaugcuaaaaagauguuguuggaguuccguugucucagcaaaagcacagauuuggaguuguauuucauauuucuuuaaaaaauauuuaugaauguaguguucugccugaauguauaccugcaggccagaaggcacaucagaucucauuauagacaguugugagccaccaugugguugcugggaauugagggaauugaacuccugaucucuggaagagcagucacugcuuuuaaucaccaagccuucuauccagcccauguuugauauuuuuaaaguaauugacauuuuaaacuuucucucaaaagucaugaucugacaaauuuuccaugacgauaggagugauuuuauaaauuuaaaacuauuaguaaaaauguuuuaacauuauauuauuuuuucugauggcacuaaaaauauuugaauauauggcacauggcauauauugaaaacaucauaaaauccuauuacacaaaaggaauaauguagaguaaaauacuaaauauuaagcaauacccaugauuaauauggagaauaagaaauuaugagaucaugaauauuauuuucuucuuuaugcauuuacaaaugcucuguuuuuauaauagcauuauaaguaguaaauuuauaacuaugaaaauaauuggguuauuaagaguuggcuccaagccaacaucaauggaugucugaaaaauguaaaagaagaaauuaaaauuuugagauagugaauuaagucauaagagcugcagauugucacuugagaaaaaugucagaauaaauuagaagaaagauauacugaugggaguguaucugagugauauaaucagaaucugugugaaauaauauaaaauuauuauaugcuuuucagguauauuuuauauaaugguauuuauaaaacauccuuaaauuauagauuuaguaaauauguaagaauaauguaaaacuucuuauuuugguuucauuuaacuuacuucuguugggcaauuacugaacauacaaaguugaaacagacaguggugacaguaccuugucacacacaagauacuaacuacaucacacugcaaagaagguauggagggaaagacaagcagacaccacacagugcauacaguuggugcugugauggaaguccacacugggccuaggcacaucucagaaggaaagugacuccuacugaggggaaggagaggucaugaugucacagagaaugaacaaguuucgaaggcuuggaagcagcuucaauaacucacagacacauuuacuucuacaggauagauaggccacaggguaagagguaaaccuagacagcucauggaagccagucaucuugcauuggauuuuuaaacccugacgccacauuuaaauaauggaagauuuuuguugcuguugcuguuguugccauuggugguguuugcuuugagauagcauaucacuuuuuagcccaggauggccucaaaauucauagugaucuucuugcugaagguguucuagcaggcucuggcauggcaaacaguacacacagguuugcacuuucacaucuuuucuucucccuuuccccaaggucuauucccucauuuggcuacugauucauuccugagaugaaacaccgagggccaacuauaagaauuaauuauuuggcuaauauguccagucaggauuuacuaauucacuccagcacauauuucccccuuuccccuuuaaaagcucaaucaugaagaagcauccccuugcuucuuuugccccuugcucucugauuucuuuugcuuucuuacuugcugcuauguugccuuagcagcagcuugaccaucucccuucccccgcagccccacauugcccccaccugcuccuccuaguuaauaauucgguguacugagaauuugguuuaagagugccgaccucccuuucagugaugcuaugacuuggaucaggacucguuucuaggacccccgauccaguucuccuaauggccauucauuucaucucacagcagcuuauuggugagguuucucuuacuacccauccuaaaccuuccccgaaucaucggaugauuacuguugaaugucuagcaucccugcucugucuugcgcagguggggagaaugcaucuccccacauaccccagccuucaguggccaagguggacuuccuuggauggucuucaggcacaucccauuucauucagcuugguuuggauggcaguugucuuuuucacuuuugguugcuauccguuucuaaccaucugaaaauucuaucgacaagcuccagauuucuccucaguccacugugccuuccccuuggugauggagcuugggugacgaccccuccucacugaggcucuuaugagccaggagauaucuucagcucuccacucuggcucaaggccaccacuagcaaaggaaacugacucucucuguacugacugaaaacuccagcacacaccuaaaguuacugaugcaucccaccacucaaagaacggcccuucuauucccuauaagaauaaacaaaaugacaauauuuacagaguuggaguauuccaggcaugucccaucacacuaggcucgacagccuaaguaaaaugugcauguuagcgcugaugggaacauagaggucagcugcucacugagaaacaggagaaaggagaugaguuagaucaauagaaaaugcuuacauucauuccaguaaggaaugauaaaaguuuaaaugaacauucacaauuugcugacuuacuucacaacacguuuacuaaagcuuagcaaagugauaauaugcacagauccuuuuauuguagcaggaaacuuuaaaacuaauauaaugcgauaaauauuuuauccguguagcauaaauuaaagggacucaauugccugcaucuuaaucucgauuagugccuguuaauagcaaaacacacacaauuaauuguacuuuaaaagcagaucaguuaucaaacucagccuuagaauaaaaauuuugaucuucaaauuuguuuauguaguuaauaucauuauuguuaguuuuggugccagggauauaacccagggguacacaguaugugcuaagcaauggcuuagccccuagcauguacauuuuuacuaugguugaggaaccauuaaagcuuuagcaucaaugaauuaaaugcauugcuauuagaaauuagagaaaucuuaaagcauuaaauaucaaaauugugugaacaucaaucauaaacaaaugcuaacuaaguuacuuuuuaauggaaaaugaccauguuucuagagaaaaggacuuacguggcauggguuuuuauaauuuuauaaauuuucaaauaucuaaccuaauaucuagauucuuuuacauuuaacagauuuuaauuuauauuuagauggagaauaugaaaaacaguuggucuugcagaaagguguguggaaaccugaaauagcgauuucauguaaguauaaauauuucuccuuccugguaggccacauuagauaaauaggucagagucauauccgcaaacccacuguacucugaccuaugcaauucauuggcuuauugugcacaguuaggugauuuacuauccacaaagauauaugucauaagcauggcccauuuauagauuguuagcugacugugcuauauaaaguuuaaauuuuuacagccucuccucauuagucugucaacaucacugcuagucacaucuggaaauccuucauauuuaaaaugcugcucaauuccugguggcagaaaaguguuccaguauucuaauggucauuuuugucacgggcaauacauauuuacaauuacuuuuuacuccuugacauggcucgaucacuucucucauuuuugaaaaugacuuaaaauguaagcuggaauggucugcaccugucuaccugcuacauuuuccaaggcgugauaguguucaauggaaauggaaucaguccagcugguaacucacacagcugugcagguguguuuuggggaugauauuggggcaccaaacaaacaaaaaaacgaacaaacaagaugagcccuggggcuccagaugaaauaguuuugcagcaucaucaaacagacuccuuuaagggaauuggauuuucauuuuauagauuauuauuuuuccuaggagcaaauggcugugaaaaauuuaacaauucuucauaccacugccuuacuaaggauuaacauugagaaauauaaauuguuuuuguaaauauaaauaaccaucaacagugaaaggaaggaagagugcuuuuauaugacuauaaagacaguugggauaugauggaugccuaaacguuuucaaggaaaugcaccaaaguuaugggguaagauaaaaaauaacugcaaaaguuauuuuuaagacuguucuagucuugaugggguggacacauuuuugagagcaucaaagacuaaacacugaguugauaacaugacugaauguuuuuuguuuuuuguuuuuuguuuuuguuuuuguuuuaaauaaaugucacaauauggcgacaagauuaaaagugaagaguaugcgagaguagagagucaacaaagucauagugacaaaggagagguggcuaauuggugagcagguaagguuucucucuggaggagaagcugcuggaguuugucacuuuguuacucuacaguguugccuggaguucgauacuucauuacucuauaguggggugaagaaguucaccuucuuauuuucauuuccuucccucaaugauuucuucagagcuagcucuuaccagcuagaaauucuucaaacgacacucgugccuuccuucacacagguugaacuauuugucucuaaugcccuaaaguacugguguucaaucuuccaggcacuuccaaugaucugaaaucugaccugcuuaggucagcuggcucugagauuaugguauucuaguccucaaaccaaccuguuggcucguugguuuuguaccaaacacacugacuuacauagcucaaaauaccacuggccuuuuaaaaauggcauaucacauuccaggggaggaucaaaacugcuggcuggugauauuugucaagucucucaaaguugcacuuuccaggauuuucaauucacugaauucuuagacagacauguuuaugugaaagaauucuuuauauauuuuuucuccucuuugagugggcaaaugaaaaucuugaccucuggguuccuuauuuuauuugacucucuguaguauuuaaaucuuaaaauuuuccuuaaaauaaucuaaguauggauauuaauccaugauauuaacgaucgauccuuguuuacagggugccuuucccugcuccuaccaggcgauuucauauuuucaaggaucaguucuugaaagaggauguagcccucgcucugccaauggcucuggcucagccucaugcaucugccuuugcuauagucucaccggaacauugacauagauugauuuugccaaugugaucaguugaguucuacacaguuuaaaaaugucauguucuggcuuaguguuuagugguguucuuuguucauuuaucguuuacuaucuuuaguuuuuuuaguguauacucauuuuuuccccuacuaaaacccauagccaauaauagacauuccauaaguacaaguaaauuuccugaaaauuuucugaagucugacuggagacauuagguuacaaaauuacacaauuucaaguuucuuauaucaaaucuaaucuuguaucacauuucuuuccaaaauuuccauuuuuacaauuuugcuaaaacagcaaauuaauauauuaaauauggacuaauuuaauuaauauucuaggugauaaaauauuaaaauauuuggcuauuuucucauuuaucuccuggucacuauuuugauuauguaaugcuuauccuuauaaauugauuugccaaguuccauuugauaaauaauguguucuaacaucuauauuuaauuuuuuaauguuaaggauuaaguuuggggucucacacauacuggacaagugcucuaccauugaaccuauuuuaacuuuuaaaacaguguguucuuauuucaaaaauauuuucugccauuacaaacuaaagaauuuagaaacaaaucaauaaaaugggaaaaacugcacaacuaaauuguuaguacuaaugcuuauugugcaauguuuuaaaguuauguuauuuccuuaugguuuuuauuuuagaucuacauaaugaacauucucuacuuuauuaaaaggagaaaaauaauucugacuuuaaacaaauuauaacaagaaaauagaaauuauaauugcauauagcagacucuaccaauucuaacacuaguuuuauucauuuuuuuuuuaggggaaacaaacauuuguaucuuuuugggauuugugcuauuguauccucagcaacuuuguacagaauuaaauguuauuugauauguuacauucaauggcccuguaauaucuuuuuguuuacauagauuaugauuuaacauaguauauguaaacuguuuuaaguuucaucggguugcaauguuuuuuccuacauaggaaucuuuugguagaagugacaguugaagguccagauuauuauuaauuaaaaugauuggauggauaguccaaacuuaucagccagacgcugauuuguuagaacuguaauuccaaaucuguaccacaaacagcaagagagaacaguuagcugguuuguuuuaggagauuacagcaucggaaguccaaccuugggccaacuacuuuuacugcuugcuucauuccugccauuuucuggugcaaauguugggcucuaggcugcaacauuuucccaagacauugcacuuuguuuaaaugagccugacccaguuucuauugcuuauagaaacacuuuggaauugaucguuuuauuuauaaaauuguccauaagcuccuaaguuuugcauccaucuugguuccucuuguaauuaaaaugaguaaaagccuuaaugcuuagcacagaugguggcucuaaauaugcauucacuucuccacaucauguuauuuaugcugcuucuuuaaauauaaugguaauuagcuaauuacaacauuagcauaucaacauaugcccacacuacuccuuauugugggagaaggguauggaugacgaaaauccauccuuaauacaauuuuaaucaugucaucagcaacaaaaaaagacugaauugauauucagucuuccuuguguauuuuagucaucauaagcaagccaaaggcaaccaucacaagaugaaucguguucaccucuagguucauuugccuaaagccaaacuucccuacuccauaucuguguguauuuggaggcaaggccuuuaaaauaguuggaucacacgguuagacacaaucuaacuuuucuccaucuaaguggaaauuuaggcaucaaagcaagcacugugaauucaggaucacagaagaaacaaacaugucagagcacagagcaugaaaccagcaagccaagcagagaagcaucacaaggaaccauaccugucaauaucucaaagccugaucucaugcaaacuauauuccuauaguuuaaaccacccagcauucaguguaguguuacauaggcccaaagcaucuaaaauaaaaccaacucuauuugagaaguauaauuacaaguacaacagaaccccuaauggcauuugagagacaaaggugacuaagcagcgucuaaugaagggcaugagcaucacuuacaugugugcagcagaggacgugcaaugcaggagggacccuucugggaaauaacuagccaucuccucucaggaagauuagguucauuaaaaugcuguaccuaauuaucacuuuugcuuucugggaguaucauaaacaaaugcuuucccaaggagaaggaaaaauuuaugguacacuugaacccaaagguugcaaugggagaauaugggucauuuaaaaaaacccaacagauuuaaaucuauguaagguuuuccaagaagguacuuuuuugguggcauuuccuuuaaaaggugucuuguauaucuaguguaaaauaaaugauaguaauagcacaaaugaaucaccggccguguugcuaagaaaguucaacuuggauagagaaugcagucuuuucaagaaagaguucuggacuaaguagaugcuuacaagucaaagcaaggagcaugagccauaagccgaauugcauacaagaaacugacucaaaugaaccagagacauaaacaaaagagccagcuacaaaaacauacugcaaacaaaacagaaucaauguccaguuuugcauagaguuaggccuauaugguacuaaagaaggacaggugauauuaaaaaaaaacaacaacaaaaaacagaaacaaacaaacaaacagaaaguccguagauacugcauuaaagcuagaggccuguuaucaugggaguaccagaggagcugaacaagaguuuuuuuuauugcucauaggagaaaacuugaaaccaggaucuauuguaaguugaaauccacaucucuuagaaaauucuagggucugaucugagaacaaggagaaaacagguaguugugaagucuaaaaugauucuuauuuacguuauacucccuuauaauguggauucugaguaaacaaagcaguaauuucaagcugagcucugguuuuccaauagcacacucauuuacuugcaaaacaugacuugauugaacaccacuggccagcuguugugugccaacugcaggggcagauaagcuccggucuacauguuucuucuuguauguauagucuguaucauucucaccaauaaccucacccagaaucuuucaucaaauugugcauaugugugugcaccuguguugggugcaugagugugugugugugcauguguguguguguguaugugcaugugguaugcaugagucuguaugugugugcaugugugcaccugugugagugcacaaguaugugcacauguauggguaugucuguaugugcauguguaugugugugcaugugugugugugugugugugugugaguguguguguauaugugugugugcguuguaacauuuuucuagccaacaucacugcauucuaggaaugacagcauuuuuccucagagacuuaacaaguuguuaaaaaaaaaaaagcuccuuguaaauaugaacagauuacuuuucuaaaccuagaaacuugccaauauaaaauacaaggcuuaaauuuauucaaccaauuucccucaugcuuuuuaauagaaaccacuuuaagagucugaguccagccaccaggaacccacagauguggggaugggggugucuguuagucccagcucuuucuuaccucugcauagacccacccauacagaggguccuuuucucacaucaccucaggucccaggucccaggaccucugugcgguuucuguucccaguuuuucaaucauuguuccuuucuuauacgcaagggucuccaucccucuacucauuuagaugucucaacuacaaggucacauuucuaccuccuuuuucucuucaagccccucucuccuaucaucucuuuaugcgguguucuuuuucuuuaagggccuuugauaguccuuugugcauuuuuuucuaacuuuauuacuagacugaaggcaacauaugggcaugaauuuccuuguaauuuccaucuuucaacaccuucggacaccaacuagagggcuuuguaaaaaaaaaaauuuaacuuggaugucacuuuuugacaucuuggcaugaaaggauagagaggaguuaugcuggcaagggcugauuuccuuuucggagucagggcuaaccagugguucuaccaccacacagacaugaguguucuagaauacagaagcuauggcaaggcugccugaguucaaguuugugcucugccacuuaucuguguaacauuuggcaaggcaaucuagucucauagccuucauuucuucccuugucaaauuaucaauauuacauaguucuuacauuccugaaguacugcuuagcaaaguaaguacuaccucucuauaauaaguugaccucuagguacguagauaaaagagaagaguuacaagcacaaguggagccacuuuguagaucaucuggauuuuucagacacgugugcaccaagaguaagucucuuucuacagccuacccuaagccagagaaacacaaacggagcuguaaauuccgcuuaauugacauuucagaauuucaaagggaaguaauugcgucccugagcuucucugcacugauccagagugggacacaucucagcccauggauugcugugguucucuuucuuucccugcacucuuucucccccucccacucuuccaagucagaucaggccuucuugcugaaggggaauggaaaggaguaccuggcggauuucaucuucuucaccuaaccuggagggagaggacaacuuggauagaacuuggcaugccugguuuuacugccguggcccccgaggacuacccagaucuccgcuguccacagagaauggaaauuaaauucaggcuaacuuucaucaucaggaacacucagauaauguguucugaucaucaugugccugugugugugucaauuuugagcaacucuccacgagagaaggcuucucaguggaauggaguccugaguuucugguccuuggguuguguccuucugucuguccacuugcuccugaucuuuuuggaugggaaggcagauuguuugcucuucuccccagugccuucuuggauacuguauaauuaauuaggccuccaaucaugccuucccagccuccacggauggagaaacccucuccgccaugccuuaaagaggaauugcuguaauaaaugagucuccugauagcaaauuucucagcaagggggaaucgcguaaauggagacauaguauugacagcaaaguccaauguguuauuuuuaccagaacgaacucuccgguucaagccuuugaaagagacauuugaaaaccaaaaacaaacaauguaauggagcgaggaaaaaagccacagaagugaguggcagggaguuuaaaagagcagaugccacugccaggucuaugggacauaaccagccacuugugcugggucuuggcaguuuauaaugcuaccucaucuucuccgcgaaauuguuuucccguaaaucucuguggccauccauuccugucuacacauuauguuccuaaaauagacaccaucuaaaaaucacuucaaggagcuuuguggaggaaggccuaaauugcaacacuccuccagcgaagauagaugcaguguuugauggcauuaccagucgguagccaggaaggggaguuugugaggaguuuuuccaccacaguuaaucuguuucuggaaggaaagggaagugucagacuucccgaggaggcaaacguguguggaagcucucauuugcaucacccccggccugucagguauugcagcaaaagggagaggugagcuacccuggcucuccuugggcaggagggacagaaucaggaagcaucaaccucagcauggaauuuuccuauuccuguuuggcauccuccucuugggaugauuuacagcgcggguuggagaaacacgcucugccacuccacuagcgcaccagauagacagugcagaccugcagauccauacccgaggagaagccacauuuccuacgugugauagcaacagcguuuggcaauuugcgacuuugcuacugcagcuuagaaaauauuuagucacaugcacaucugaacagaaagacacccaggcuugacucagucauuuccgucagacacacgaaagaaaaagcgucucugcucacaagcuuauuuggacugcuuuguugaaaggaggggcggcagacacuuuguagauguggcaagagggcuuuauauccagaccucaaacagguaggagagaaggaagccaggagagguaaggaaggggcguggaaaagccucacagccaccucgaagaaaacaguuuuuuugcccuguucagaaagcaagagguuccacagugguuuugugucaauggagcacaucugcaguaucauugccguuggugaccucugucuaauuaaaaguaagucaguccuucccacccggcauugucugaaacccgggacucuuuaucacuuugcuaaaguucauuugcaaguguaguuaaggaagagucaggggggaaacagcaucugucccuucugguccuggggaggaggcacuccuuuccaagagucaagccucugcccaaagaagcugccuccccugcaaugcuaggauccaggagcagccccgcugccuucuugcuuccucugugaggucuaauuuuugcaucaucuuuaggagcgauaugaccucuauucacagccaucgaauccaguuccaaagcaccaaugacagagggggcuucaagacaagaccuugccuaggaggaugcaggcaagcaaaggcaagagcuggcccgaugccaaguuauuuuaggccaaagaaucucauccuucuaucaaaaugcugaacugcaaaacgaaccugauuucaguucauggaagguugagaggaggaggagggggaggggaggaggaggaagagaggaggaggggaggaggagggaggaggaggaggggaggaggagggggacaguugguccgaauucacaugcaaaaauagacuuccuguucugccccaacucuuauuuccgugggcucuucuccccaaggauuuaccagguaagaauucaccaccaaagaagaucacaaugagauaaucagauggcuuaccugauaaaaaggaaaauuauccaucugcagugaggagcaacaucuccccacgacgaguccgcaccuuccguugcaacgauucagauuccuucuugcaaaaggugaccaagugcuucacaagggcugcagccucauaggggcagaacacacguacacaaacacacgcacacacacacacacaugcaccagagaccucugcaguauccucucggcuucauccucgccucacucuaugguaccuaauacaaaucagcaaauagcuuguuuuaaaaaaaaaagaaagaaaaaaaagcggagacagcaccuaacguuacagugccaucuaguggcuacaucguaaauagguucucacagccuggauuucuguguucuuucucaaccgcuuccuucugguuccuuuuucuuuuuuccucuuuauuuugguuuuauuacuuccucagaugccuuuuuuucauuccccuuugcucugccuaucauggaacuauugacuuaaagauuaaaacaaucagaacuggagagcguugcuuuuaaguuaaaaaaaaaaaggugcuaauuuuguuuguaaauguuacuuuauuuucucuauuaaaaaaaaaaacucauuguuacuuuuacagauuacggaacccaugaaugaaauuugcuuauuucuacugucuggagaaaagugaguagucuuuuacuacguagucgugacuuuacaugaggaauuuuguggauucuuucuucucuaacaccguguucacggugcuuuucauacuauagugaguggcucugaaggaggcagaugcgaguuuaauuuuaaacucaguaucgaugaguguguuuugaagauuauaucccccuaucuuuaguauugauguuaaauaggauuauuuuuauacccauuuccaugguuucaccaucuuuuauuguaauauaucuauuugucucccagauaugacuagccauugaauugucacacuauguuuuagagaacaaacguaaguauuaaauauuauugguguccacuaggucuucccaaaacaaugaggagcccauacugaagucuggggagcuacaggaacugaacuuucuaagccauauauuauaauuuaaagcaucauuagucuuucacauuuggucauacauaaacuuauuuacccuggguguguuucucuugucacuuagcacacuuaaugcugaugaaagucaccauacaugcuuugcuauuaaaaaaaaaaaaaaaaccaauaucccuuagacuuuaauuugucuauuccauacuacaggacagggaggcauauacuguuaauauuccucuagcaauucucauuguauguugagaauaaugagacauucugaaccuuauugagacuuuucuagaccacauaguuugugaagcaaaacaaaccaaccaaccaacaaauaaauaauaagaauaaggauaaggcccacccuuucagaauucauuauuuuuuggaaaauaguaaauauuuuaccucuuuccauucuagaauccuggagauguaauuuucauuguuucuuuauaaagaaauuuuacaaguccuuguuuauggguucauggguccaucuccugggccccuuucuuaguuucugaaaggaagcaauugaccaaaauugagcuggaaguauauagcucauuugguagaacacuuaguagacaugcaccaaaaaaccaaaacaaaacaaaacaaaaaacaaaaaaacccaaaaccaaaaacaaacaaacacacacacacacacacacacacacacagauuuucagccuuguagacugcuuguacaauaaaaacuucagaacuuggaaugcugagguagacugaucacaaauaugaguucaaaguuauuaugggguuagaaauuccaugccaaccucagccucagacauagucacaggcucagccucagcaacuaccacagccauggucacagucagagccacagccacaaacacaaccacagucacaggcacagcuucagacacagacacagagagagccacagucagggccucagccacagcauuagccacaaccucagccacagccacagcuacagguagagccucaggcacagacagacacaaacacacaaagacgcagccauagcugucaaagucacaaucacagucucagccucagacacagacucagccacagcuucagacacagacauagucauaaacacagagaaagucacagucauggacacagcuacaaccacauccucagcuucagccacagccauagcuauagcuacagccucagacacagacacagacagacacagacagacacauacacagacacagccauagcuguggccucagaaacagacucagacacagccacaaccacugccacagccauugucacagccacugccacagccacugccacagccacugccacaaacacugcuauagccacagccacugcaauaggcacugccacagccacugcuauagccacagccacugcaauaggcacugccacagccauagccacugcuacagccacagccacugcuacagccacagccacugcuacagccacagccacugcuacagccacugccacagccacugcuacagccacugccacagccacugccacaaccacugcuauagccacagccacugcaauaggcacugccacagccacagccacugcuacagccacagccacuaccacagccacugccauagcugcagccacugcuauagccacugccacaaccacugccacagccacugcuacagccacugccacagccacagccacagccacugccacagccacugcuacagccacagccacugcuacagccacugccauagccacagccacugcuauaggcacugccacagccacagccacugcuacaggcacugccacagccacuuccacugccacagccacagucaaagucacaaacacagacauggccacagucugagcuucaguccgcacuacauaaugagaagcugucuucuuaaaaaauuaaguuaacuuccuguuccaucuccaaaaugcacaauaauuuguagcucuucacugucugaaaaaaguguugcuccuucucugguucaggcugaguaacacuggaagaagcuggagugaccaacacuugguaacuaguuacuagaaaguuugaaaugaaaaggcagaagggaacauuugaacuaagaaguaguuuuauauuuauauuaugauucuaagaccauauacuccauaugaacaguacuuaggauuuaaauauaugcacauaaaaauaagaacauccaaaagacauacuuuacuacuuacuaauagcauauuccagaagucaauguugugcauuuuuucuuaauaauaauaucaacaucucuccuuccuuauugccagagugcacuuggucccuugucuauagaggaccaggagggcgugggugguguguucccagcugaaccagucuaaagaacuaugacaugacugccaucuauggaacuaaccuucucuuuucucucaccauagcauuagaagcagguagggcaggcaggaugccuacaggaaaugucacagcuaaugaagaaugagggaaccauccaaagccagugcacucccuggguuccuaaugauaucacagguacaaggcagaaucucagaagaucuggaacgucccugauuugaguauacaagacagccccuaaaaagucucuggaccaaucucuuuugauauccccguguacucaaaaccaguugauuuauggagagaggaguuuaagcccugaagauaucaaauauugguuauaucauggguguccaacucugaauuuacucacuucaaaaguaccugcuaauaaaggcauuuucccaggcuuaauuaacaccauuaagccaagcaaaugaacucuuacuuugagaaguuuccaucucacaaugagagucagugagaaagggagaguauuuucaaugcaugcaccccucuuccuucgguuugccuguuucuuucaugacuucugcaucuuaacaaacauccagccaucugcacaaggcaaaguggaccagugucuaggucaaacaucuuuuucucuaaugcuuucccuguguuuucagugaauaggcuccuuuuguuaauuguaaaauaaauuuauguuuucuuuuauggaauauggucacggauuauauugaaaauguuaaucgugagagaauaaauguuucuuugcagacuguuucugaagaagguuaacauuccauucacuguacaagagugcuuuuuaaugaauaaaaaauauucauuaaauauagcuugucauuuaguagcagacacgugauucaucagagugguaacaacaccaacugcuuuaauuuuucuucaucuaagaccugccaugaaggaaaagacaagauuuuuaaaaauuagacccuuaaaacuauguauuuaaauuuuaaauguucacuuuuuaaacauaaaaauguaaacuaaaaagaaccguaaaacuuuaugcugcucucacccuuguguuugcuggccucucuggacuuuugcuaaaggucucccauuucuaucugucuaccuucuaauaaugaacugcaguugggcuggcauauuauaucccauauaccuuuugugguaucuuaguuaaugaagaaaaguuuuuauuuuucacuuuucccuggcuuauuuccaucaacaaagacugaaggggccauuuccuuauuucugggagaccccaugugaucucaucucagaaaagagaagaauguuauuucuuggcugucucuacuucccuagauggugggugcaggaacuugacagguaagcugugggcugugccucuucuguaagcgguuccaacaagagaagaaaaugagaacacaaaaugucuugucauugcuuuugccacucugucucugucaggaggacacagccaucucuuugccauuacucuguggggcaugggcucugcacagacaggauggucuccaguugagcugaggucugaaccccguuugugauaauucaccuaaauggcacgguaggcguucccucaugcuccuggaacucuggcuccugccuaaguuacugccccccacaacccccacaagagaagcauggucaguagucacguaggcaauggcccaagcuucugaccuucaagcuaaacuccuccccuguuaccuagcaauagugaggaccauaaaaagggcuguuuagccccugcuugcucucuuaccucuuacuucucacucucuuaccccucacucucacccccucucuccucucucuuugucuucucuucucuuuccuuucucuuugccuucuccucuccucuccucuccucuccucuccucuccucuccucuccucuccucuccucuccucuccucuccucucucccucuuacucucuuucucucuagccuucucucucucucccuucucucuuucucccugccuuucuauaauaaagcuuuaaaaccauagagagucucugcucaucaagauccgcuucaugcacucucacagguguugggaaccucuucccucgucccgcucuucuauaacccugguggcuuuagcaagguagcuccuggauccccagguagggcugccccuuggccacccgcugaagagugggucagaggcuugaaugcccacccagggaugaguggaaaguguauggcagcucucccaugccugacagaccagagaauagguaaaacucuggcggggugugagucccccccuucccuagggacccccuuuuuaguucccaacauuacuccaucacuugcuggaaagcauuagcugcuuaguggccaaagaagggagauuacaagagauguuaccucuguugguagaauguggguauuaaagaauaaaugugggauucaaguggaaaagauagccuagguucuuucuaccuaucaguuuuaagauaagcaagaggaucucuugugauuagcaucuugaaugauucaaauguucucaagaccagaaggcauuaaaauuccacagugaaauucguaaaaucuccuaacauggaaaaaauauccuuuguuaauuucaauuuuagaauguuaauugucaugcauugugacaaccacugcuugaauauauuuuuugauaaucauuaaggaauuguggaacuggaaaguuuucucagaccauccagaagacgauuauuauuuuggauaacagaaaugugacauccagagagauaguaugucuuguucaaggcuauacagacaguuuggaauuguaaaaguucauucaaacuuucuuccccguuuaacuaugaagaaaaugaauauugagcaaugacaucggcacacaagaagugaaauggaagugaggggaggguuucuggauauaccacgauugauuuucccuaaugauuugacuaauaugaaugaaauaggaggauauaauagaagcugucuguuuaaaaaggugauggaccaggagggacuuccaguggagggaggggaacaccaaccuauucacaaaaccuuuggccccaaauuuguccuaccuauaauaugugcagggauaauauauggggcagagauucagguacaaguuaaccaaugacuuccccaacuuuagaagacccccgcccccaugggagaucuaaauccugacacucuuagugauauucugcuaugcuugcaaacaagacacuagcauaacuguccagcagccaguggaaacagauacagagucccacagccaaacauuaggcagaacucugggagacuuggggaaggaucgaaagagucagaggggucaagaacaccacaagaagcucuacagaggcaacuaacuugagcccauggggcucacagagacuaaaccaccaaccaaagagcaugcagaggcuggauauggaccccuuagacauuuguagcagauguacagcuuggucuucaugugggccucuuaaaaauuugacuggggguugucucugccucuguuaccugcuuuugaugccauuccccuagcugggcugccuugucuggccucaaugggagagaauacauuucgaccugcuaugauuugauaugccagguagauugguacccauggggguucucugaggagaaggugagguggcacugagggagcaguaugugagggcaggccuagcaguaugugagggcaggccuagggagagaggagguagaaggguuacaucaggauguaaaguaaauuaaaagaaaaggugaaaggcuaaaccaauauuggguuaagcacugaucacccucauguauagcuuugcagacaguucuuaaaaauugaccacaaacuucucaaacucaaggacaugagaguacaacacucaugacuuucauucauguccaaggagagaccuggaagaaaauugucccaagguucuaaaauuucauuacaaucugaaguaaaaucugaaaacacauuuuauguuuccuuaguuaauaaaucauagccucgaaggaaaacaaagaaaccuuuucuuucuuucuuucuuucuuucuuucuuucuuucuuucuuucuuucuuucuuucuuucuuucuagauaaagucaugaucuugucuuguguaccuucaaagacccagaccuaaaugguccuucugucuugccuuucaaauagucaggacugauggcauguaauaaguaauaagggcuggaaaguaaaguaguaugcugcucaugccuacauuguauaccucacuggcaaacagaucaaggacuaggccuuagccuuggaggcaagaucuaggcauauuacaguauuucaauuaauuugucuggaucuacucuuacagggggaugaagagagaaugaaacuauaacaagaaacaaagaagguacauggaaagucauaaaggauuugguaacuaugcuggauucucuucugugcucauacauacuggcuuuuaugucaggaagucauugaaauauauugccuggguuccucccucaucccuuucacucaacaauccuccuccuuugcagagguaagccaacuaaaacugugacaaaaauaucaucaauuacuuauuggauuucaaagagcaauuuuccauuugacuauauuuugaagucaaucacagcacuugccuauauaugcaagagaucuagcacacuuuaaguuuacagauuauuuuugauauuaaaggaaauugcugauauuuaugaagacaacucacuuuuauaaaauaaaacugaacuuugccaugacuuaggauaagccaauaauguguaggcaaauauguaauuccuauuccccugaaggcuuauuggugacaucuuuuucuuuuccuguuuaaaaggaaaaaaaucuacugaccuuccuaggaaccucucacaguccucacacugugugugggugucauuacagccaagugccaucuuauuucacauggcuuagugaucauugcugaagaaguggaggaaagagugugagagacagaggaacagcaagcuuucugugagacugggucuccuagaaaugccagagagauuacacccauagagucucaucaacauggcugccuaaauaagaccugaacaaugacaacaccaauggccauacuaacaugcaacuggggaagauaaggagguucacacuagaggaagaacuauggacaauagggaaaugauaagaacuggagaaaugguuuucccugaggaagaacuccccaauuguuaucugcuauaaaguggucagcccuggcauaagaugcauacagguaacacuauauggacugaccagguuuacaauaucacagugaaugcuauguguuucauauauacaagcuaucuaucuaucuaucuaucuaucuaucuaucuaucuaucuaucuaucuacaauuaaauaacaaagaugccaugaauuuggaugaaagcaaagaggguuacaugggaagaguuggggagagagaaagggggucauguucuaauuguaacuuagaaaacaauuuuaauuacuauaaaaagcauucauagguuuagcauaauucauagaaacaagcucucuaugauaaaugauucuacuuaacaccuugauacuugguaccauccugugguaagauagguucucagaaaaaaauguauugauacuuaaauauuuauuucucuuuccaggucaaaauuugauagugauuucaaauauauggaaauuauugcuaaaacuuaguauaggcugaguauuugaacacucacaggaaauucaugacauugauauuuuugccaucauuuuauagguuagaauaccaaaaaccaaaacuauuuaucauuuuugccaaggagauaaaauguagcuuggaaaauagcagccuaucuucaaagucggguccuuguuuuauagaaaucucuuucuagcaccacauuauuauuaugcuauugucaagucucugggauccaaggggaaaauaggagauggugcagcucuucuucacuggucugggaaagaucacaaugugcuuacauagacaccauggaugaaacauauuucuaaauguacccaaggaaaggggguuuugagguacaaggcaggcuggcagccacaguuccaacaaaugugguauuggguauguggccaagaaggaaaguagcaaaugacaccucuuuuuacuugacccuaagucucagaucuccuacugcagggugguggacuguaagguaugguugagccaaaggcuugaugcccuggagacccugaagauuuaguaggagcuucgccugcucucagcaccaauccccugucauauagccauagcccccuauagauuugugguuaucaguagcugaagggcaaugcccaagcccuuccacauauagaugaagcaucucuaacaucucggaccaagaggcaugacuacagucauguaagcucaaaacagaguucucuaugccaaugagguaccuagaggucgagagggcauuccaauaagcuuccuuucccauacauuucucccugcaaaagguauaucaucucaugccaacccugagaagugggguaugguucuacagauccauuuuccaccaugacaauaauaaacuguuugggaccauggaaugccucuuuuuuuauugugaucaacagugggaagacauggagaaggccuucgccuacagagucacagucuagucucugaaagaaggcaucuuugcauucucagccacgaucaccaccaagccugccacuaucaagccaaagacaauuucugcagggacuagcuggagcuccucccccauguccaagauccugagaacccacaguucuggggagcaccgaaccaguacggagucaaacucccccauccagucuccacaaguggccgugcucaguggugggacagacuugugaugacacaacccuacauccuacaacaugugaaaggauaugacuguuuggaaauucucuugccaaaugaacacaucaacuaaauuucagaggagcauucaggggagaagaaucucucagucugucaguaccuuaguauccacaagucgacauuuguugaacauaaaaaaaugaaaagagcagaauuucugagugugagagguugacaaugaggcuucugacaaagcuucauguuucaaauauaauauucaaugucauguuuuucuuuuucucagcacauuuuuugaaaaggcaagugcuuucuggcucugcuggauauuugugaagacacggaucacaugagaacauaaaacuuuguaagcuuuaaagccuugcuucucguccgaguguggcaguggaacaacagcaucuccaucuuugaggggcuuguuaaaauuuuggaccauuuccuuugucccacaaccugccagaucagaaaggacguuuugacgagcugcccaugugauuccaguagacacuguuuaaaaguguugcuguagagugccgcuauaacaggaacuugagaacuuaacauaacugauguuaugacgcaaguaccauucccuaaugcuccugcaaucuuuucauaucaccucaaguuguagggacagccaaccauaaaauuauuucuguuucuacaucauaacuguaauuuuucuaccguuauggauuguacuauaaauaucuaauaugcaggauagucuuaggcaaucgcugugcaagggucauuuguccccaccaaggguucaugacccacagauugugaacuacccauuuagacccuaaaagcucagcacauagacaguacacaacaaagacaaagaucugauccaucaaaguucauaguucuagaaccaucucuaaaugcaccaccuuuggauuuuuggcuucuguaguucugcuuuggcuaacuguucuuacuaacacaauuccggaggugguuucacucugagaaagguucaggauuauacaggaucaugaauacccaguguugucucuacccagcugauaaagacuuucuauugucuuaaacccauguccaugcacucuucucugguggacaacccacaacauuagcuaauacuuucacaccucucauaagagcuuuuauuuuuaauuaaauuuuaauuuugcaugcaaaauaauguuuuuauuaugacauuauauauauuuauccauauaugcauaaauauauacauauaugucauuacauauacauauauauaaugucuauauauguauauaacaaaucauuguucuuauuuguuuaccccuuacuccucuacccuucuccaaccucuucuuuuuggucuccuuucuccuccuaaauaaaccucccuucugauuucaugacccaugugaccuaacguuuauaaggcuaccuauuuuucuguacccagagcaugugacuaaacaauuugucccuucucaucauuuucugggcacuccacacuccaauccagagaagcuaucuccuaaucuacucuugaaguaacaguuugaaaauuagaucaccaugcuggcucuuuaaguaaaaccuagccuuccuauuuacugcacaggugcaggccauaccagucagaaaagggaagagccccaccagauaacugaacccuccugauaacuagguuuggagcccaaacacccaagccacugacaccaccacccuacugccugcucccacuucuugcacuugccucuacgcaggugacucuccagagcacaggugcaggccaggcuaaugagaaugaguaagaggcccaucugcacucagaaaccuccuaugcccuugguuuggauccccaaggcacacucuguagacauccuuucuguguuuuaucacccacagagcucaguuaauauuuuuaacaaaaccauagaggaaaaauuuccuaaccuuaagaaggacauguuucuaaaggcagaaaaaucucuuaagacacaaauggauugaauuggaaaagaaagucccuggucaacuaauaaucaaaacacugaacaugcagaacaaagaaaaauauuaaaagcugcaagagaaaaaaggccaaauaacaugaaaagguagaauuauuagaauuauauuuaauuucuuaacagagacccuaaaagccagaauagccuggacauaugucuuacaggcucugagagaccauagauaccauccuagacucgucuaacaagcaaaacuuaaaauaaaaagauuuauuuuuauaugaguauaccacuggucucuucagauucaccagaagaaggcaucagaucacauuacagauguuugugaggcaccauaugguugcugggaauugaacuuaggaucucggugcucuuaaucacugagccaucucuccagcccgccagcaaaacuguucauccucauagauggguaagacaagauacugcaugacaaagucaaauuuaaacaaaaucuacucauaaauccaggcauaucgagguacaaauggaaaucaacaacccuaggagguuaacuacacccaugaagaaauaaauaagcucauacaaaaauuagagggaaacacacacacacacacacacacacacacacacacuagcacuaccauaaacaacaacaaaauaauaagaauuaacacuuauuaaucauuaguaucucucaauaucaguggacucaauuccucaaaaggcacaggcuaacagaaugaauaccaaagcaggauuuauccguuuguuacauauaagaagcacaccucaucaucaaagcuagauauuaccuaagaguugaggguuuggaaaaagauuuuccaagcaaauguacccaagaaacaagcuguuguaucuguuguaauauaagacaaaucgacuucaaaacaaaaauuaaucaaguagacagaggacacuucauauuuaccacaggaaaaccccaccaagaugaugucucaauucuaaacaucuaugccccucaaagcaaggacacccacauuuguaaaaccacacaucaaaacacauguauuaagucgggcgugguggcgcacgccuuuaaucccagcacuugggaggcagaggcaggcagauuucugaguucgaggccagccuggucuacaaagugaguuccaggacagccagggcuauacaaagaaacccuguguugaagcccccccccaaauauguauuuacagugggagacaucaggucauucagacaaaaacuuaacagagaaauaauggaguuaacagacuaacagacuuaacguggacuuaacaguuaucuacagaacauuucacccaaauaaaaacaauauacauucuucucagaaccccaugaaacuucuuuuucaaaauugaccacagacucuguuacaaagcaagucucuacagauccaagaaaacuggaacaacucccccaucucaucagaccaucauagauuaaagaugaauuuuaucaacaacagaaagaacaaaaagcuuaaaaacuuauguaaacugaacaacucucuacugaaugaccccugggucaaacagaaauaaaggaagauauuaaagacuuucuagaacucaaugaaaaugaaugcacaacauacacaaaccuauggcacacaaugaaagcagugcuaagcggaaaguucauaacacuaagaaccuucauauagaaauuagagagauuuaauacuagcaacuuaacagcaccccuaaaagcucuagaauaaaauaagcaaauacacccaagaggaguagauggcacgaaauaaacucggggaugaaaucaguaaaauagacacaaagagagcaauacaaagaauuaaugaaacaaaggguuaguucuuugagaaaaucaacaagacaaaaucaacaagacagacaagccauuauccaaaccaacuaaaaggcagagagagagagagagagagagagagagagagagagagagagagagaauaucuuaacaaaaucagaaaagaaaaggggggcaugauaacagauacugaggaaauacaaagaaucauuaggucgcacuucaaaaacuuacuccacaaaauuagaaaaccuaaaagaaauggacaacuuucucaauagauaccacuuaucaagaucagauaaacaauuaaaauagaccuaugaccuauaaggaaggaaucacaggaagcagucauuugaaaaggcucccaacuccccuaccucacaaaaaggaaacccucaaacaagagcuaauaucaauaauccuuaaauuauuccacaaaauagaaauagaaggaacaucaccaaauucauuucaugaggccacagucaccaugauacccaaucugcaaaaagacucaacaaggaaagagaauuacagaccaauuuuugcccaugaacauugguauaaaaauacucaagaaaauaucuacaaacuaaauccaauauacauaaaagauguguucaacaugaccacauaggacacaucacagagauucagggauggcucuacauaugaaaaucugucaauguaauucaccauacaaacagugaaaaaauacccgacgugaucaucucauuagauacuacaaaagccuuuaacaaaacacaacacuccuucaugauacaagacuuagagagaucaaggauauaagggacauaccuaaacauagcaaagacaauauacaguagguggauagccaacaucauguuaaguagagagaaacucaaugcaauuuuacaaaaaucagggacaagacaagacuguccauaguacuugacauucuagcuagaguaauaagacaaccaaaggagaucaagaggaauacaauuuggaaaggacuaagucaauguauuauuauuuucagaugauauaguagcauauacaagcagcccauaaaauuuuuccaggaaacucauacaggugauaaauaccuucagcaaagcagcuggauacaagauuaacuaaaauaaauaauaaauaaauaaauaaauaauucaguauccuuauaaacaucaaauggguugagaaaaaagaaaucaaggaagcaacacacuucaugguagauaaagauaauauaaaauauauuggggcaacuguaacuaagaaacugaaaagcuuauaugauaaaagcuuuaggucuuugaagaaagaaauugaagaugucagaagauuaaaaguucucuuaugcucauggaccugugagauuaacauaguaaaaaaaagcaaucuacagacucaaugcaaaccccaucaaaauucuaaaaaaauuucuuuacagaccuggaaagaacaauucucaacuucaaauggaaaaccaaaaaaccaaggauagcuaaaacaauccuguacaaaaaaagaacuuccuaaaacuaccacaccccugauucuaagcucuuugacagagcuaucaucauaaaaacacaugguauaggcauaaauacagacaacuugaucagugcaaucgaaucaaagacccagauguaaauccgcacaccuguggacaccugauuuuuuauuaaagaagacauaauuauacaauggagaaauaaagcaucaucaacaaauggugcugguuuaacuggauguuggcaaguagaagacugcaaauagauccauguauauuacccugcacaaaacucaaggccacaugaaccagagacaccaacaucaaaacauugcaccugauagaaaagaaaggaauagccuugaaugcauuggcacagaagacaacuuccugaagagaacaucaauagugcaggcauuaagauggacauuuaauaaauguuuccucaugacacugaaaagcuucuguaaggcaaaggacaccaucaaaaggacaaaauauucaagguacagaaugggaaaagauauacacuaacuccacaccugacagacagcuaauuucuaaaauauguaaaaucaagcaagcaagcaagcaagcaaacaaacaaacaaaaaacccucaagaaucuagacaucaacaaacaauccaauuuaaaaaugggguacagcuaguugugguggugcacaccuuuaaucccagcacucagaggcagaggcaggcagaucucugagugaggccagacuggucuauagagauauguccaggaaagacagagaaacucugucuuaaagcuccuuaagacccaacuauaccaauccugagcauauacccacagaacaguccacaaggacaguugcucaacuauguuuauaccagcuuuaucaugaaauuugcaggaaaugaacagaucuagaaaaaagucauccauagugagacccagagagaaaaacacgguacacauucaguuauaagaguauauucucuguaaaguaaagaaucagacucagagaggcuaagcaacaaggaaggcucaguguguggggggcacaugaauuucccuuggaagauaaaguagaauagauauuguggguagacuagguuggguagggaggaggacaagaagaaucauguggggaagggggaggacauggagcaagcgagagagagagggagagagagagagagagagagagagagagagagagagagagagagagagagagagagagagaacuggaaagaggagaaggacauuuuggcagugaugcagaaaccuaacacaauggaagcucccagcaaucuacaagggugaccuagcuaggaucccuagaaagugaggacacagaaccuuaacuagccaucuccuauaacuagauauccaguggagggauuaggauaccaacucaaccucagcacauucaacuuauaauuuuuccugccuacaagauguacuguggugauacaaaaauugggggaguggccaaccaauggcugguucagcuugaaacccauagagagagagcccagggcugauacugacuggaaggucaggacccagagagaggcuggauaucccagacaccucagauagaaccaaacacuauugaaaaaaauaagucaaugaaaugauuccuaguuagguucugcuguacuuguagacaggagucuagcaccaucaucaugagagugguuucaucuaguaacugaugcaaacagaugcagagacccacagccuaacauuaaguggagcuagaggaauucuuggaaggagggcggaguuguaggagcuagcugggucaaggaugccacagaaaagcccacagaaucaacuaaccuggauuaauaggggcucacagacacugaaucaauagccagugagccuacauggacugaccgaugcccucugcauauauauuaugguuuuguagcuuagucuucugugggacuuguaacaguggaagcaaggggugucucugucucuuuuggccugcuuuugggacccuccucuuuuccacugaggcaccuuguccagccuucauacaagggaaggggccuagcuuuguugcaauuugauaugucauguuugguugcuaucccugugaagacugcccuuuuccgaugggaaauggaggaggaaugggugaacugggaggaggcaaaggggagguucaggaggagugaggggagaggagacaggguaagcugugaacuggauauaauauaugaggagaaaaaauaaauuaauaaaagagagagcaacagcaauccacguuuucuuugccuaagcagauucuacacagguaguagacguaaacaauuccuuuucugaaacuuuaugcauguguuuaaguacaugaaauucaguuuuccagcaaugauaucaugcgcuauauauagcuacauaacuuguuugguuuaaaugaccucauuuacuuccuuguuauuaaccuaaaagcaccuuuccacuauacaaaauuuucucuaaaguacguuuugaggaaacaucugcuuuuacacaauggcagauuccaaucagcuucccugcaaagguguggugcuguugaauacuccagcaguaguaaccuugccuucccacaguuuuguuuucugggagggcacaucuaggcaacgccuugauuuugcuugucaauuuaccugaggcuuuugggagggccaggugaugguuauguauacacagaaagagggucagauccaagcacacggcuagagcgcggcaggaguggugagguccagaucccaugggccuagagcaucugacaaagacagaaaacuggagccaggcucacauggaaaucgggaaaaccaugcugagaagacaacagcaaggacuuacugcauuguuccuuucuuuuaaaaaaauuagauauuuucuuuacuuacauuucaaauuuuauccccuuucuuccuuuccccucugaaagcuauccugucucacccccuccccccugcuuacuaacacauccacuccuacuucccuguccuggcauucccauacacugggacaucgagucuucacaaggcuaagggccucuccucucauugaugucccacaaggccauccucuacuacauugagucccuccguguguacucuuugguuggugguuuagucccugggaguucuggggguacuaguugguucuuauuguuguuccuccuauggggcugcaaaccuagucagcuccuuggguccuuucucuagcuccucuauuggggacccugugcucaguccaaugcauggcugugaaccuccacuucuguauuugucaggcacugggagagccucucaggagacagcuguaucaggcuccucucagcaaguacuuguuggcauccacaauagugucuggguuugguaauuguauauaguacggauccucagguaggacagacacuggaggccauuuccuucagucucugcuucccacuuucucucuguaucucuucccauggguauuuugaucccccuucuaagaaggaucgaaguauccacaccguggucuuccuucaucuugagauucaugugaucugugaauuguaucuuggguauuccgagcuuuugggcuaauauccaccuaugaguucacagcagccuuauuuauaauagccagaagcaggaaauaacccagaugucuuucaacauagaaauguauuauuccuuucuuacaguaagagggagauuucuauuuccuuacagggcagugacauaauaguagcauccuucugauuggcuaaauuguucuucaaucacaguugagaaguuauaucugugagagaggguugacugcuaggagaacaaugauuaguaaguuggaaggacaaacgaauaccuuuucuguccucauuguacggaucaauacaaaucuacuucuaaagccggacgugguggcgcacaccuuugaucccagcacuggggaggcagagggaggcagauuucugaguucgaggccagccugguauacaaagugaguuccaggacagccagggcuacacagagaaacccugucucaaaaaacaaaaaacaguuccaggacucagcagaacuuaggaaauuagucugaacaggugagagggugcgccagagaaccggacagcuucugggauaggcggaagcacagagccacugaggcagcacccuuggcgggcugcagacagccggccaccguccggaccagaggacagguguccgccuggcuugggaggcggccucagccucagcagcagcggucgccauccugguuccaggacuccguggaacuuaggaaauuaguccgaacaggugagagggugcgccagagaaccagacagcuucugggauaggcggaagcacagagccgcugaggcagcacccuuggcgggccacagacagccggccaccguccggaccagaggacagguguccgcuuggcuugggaggcggccucagccucaggagcagcggucgccaucuugguuccgggacucccuggaacuuaggaauuuagucugcacaggugagagucugcaccacagaagcugacagcuucugggaacugccaaagcaacacagcuucggagaaaggcccuguuuugggccuucuuuuucggccaggaggagguccaaaaacaagauaucugcgcaccuucccuguaagagagcuugccagcagagagugcucugagcacugaaacucagaggagagaaucugucucccaggucugcugauagacgguaacagaaucaccagaagaacaaucucuaaacagagucaacucuaacuacuaacuccagagauuaccagauggcaaaagguaaacguaggaaucuuucuaacaggaaccaagaccacucaccaucaucagaacccagcacucccacuucguccaguccaggacaccccaacacacccgaaaaccuagaccuagauuuaaaagcauaucucaugaugaugguagaggacaucaagaaggacuuuaauaaaucacuuaaagaaauacaggagaacacugcuaaaaaguuacaaguccuuaaagaaaaacaggaaaacacaaucaaacagguagaaguccuuacagaaaaagaggaaaaaacauccaaacaggugauggaaaugaacaaaaccauacuagaccuaaaaagggaaguagacacaauaaagaaaacucaaagugaggcaacacuggagauagaaacccuaggaaagaaaucuggaaccauagauuugagcaucagcaacagaauacaagagauggaagagagaaucucaggugcagaagauuccauagagaacaucggcacaacaaucaaagaaaauggaaaaugcaaaaagauccuaacucaaaauauccaggaaaucgaggacacaaugagaagaccaaaccuacggggauaauaggaauggaugagaaugaagauuuucaacucaaaggaccaacaaacaucuucaacaaaauuauugaagaaaacuucccaaaucuaaagaaagagaugccuaugaacauacaagaagccuacagaacuccaaauagacuggaccagaaaagaaauuccucccgacacauaauaaucagaacaacaaaugcacuaaauaaagauagaauacuaaaagcaguaagggaaaaaggucaaguaacauauaaaggcaagccuaucagaauuacaccagauuuuucaccagagacuaugaaagccagaagagccuggacagauguuauacagacacuaagagaacacaaauuccagcccaggcuacuauacccagccaaacucucaauuaccauagauggagaaacuaaaguauuccacgacaaaaccaaauucacacauuaucucuccaugaauccagcccuucaaaggauaauaacagaaaaaaaccaauacaagaaugggaacaacgcccuagaaaaaacaggaagguaaucccucaacaaaccuaaaagaagacagccacaagaacagaaugccaacuuuaacaacaaaaauaacaggaagcaauaauuacuuuuccuuaauaucucuuaacaucaauggucucaacucccuaauaaaaagacauagacuaacaaacuggcuacacaaacaagacccaacauuuugcugcuuacaggaaacacaucucagagaaaaagauagacacuaccucagaaugaaaggcuggaaaacaauuuuccaagcaaaugguaugaagaaacaagcuggaguagccauccuaauaucugauaagauugacuuccaacccaaagucaucaaaaaagacaaggaaaggcacuucguucucaucaaagguaaaauccuccaagaggaacucucaauacugaauaucuaugcuccaaauacaagggcagccacauucauuaaagaaacuuuaguaaagcucaaagcacacauugcaccucacacaauaauagugggagacuucaacacaccacuuucaccaauggacagaucauggaaacagaaacuaaacagggacacacugaaacuaacagaagugaugaaacaaauggaucugacagauaucuacagaacauuuuauccuaaaacaaaaggauauaccuucuucucagcaccucaugguaccuucuccaaaauugaccacauaauaggucacaaaacaggccucaacagauucaaaaauauugaaauugucccauguauccuaucagaucaccaugcacuaaggcugauuuucaauaacaaaauaaauaauagaaaaccaacauucacauggaaacugaacaacacucuucucaaugauaccuuggucaaggaaggaauaaagaaagaaauuaaagacuuuuuagaguuuaaugaaaaugaagccacaacguacccaaaccuuugggacacaaugaaagcauuucuaagagggaaacucauagcucugagugccuccaagaagaaacgggagagagcacauacuaucagcuugacaacacaucuaaaagcucuagaaaaaaaaggaagcaaauucacccaagaggaguagacggcaggaaauaaucaaacucaggggugaaaucaaccaaguggaaacaagaagaacuauucaaagaauuaaccaaaggaggaguugguucuuugagaaaaucaacaagauagauaaacccuuagcuagacucacuagagggcacagggacaaaauccuaauuaacaaaaucagaaaugaaaagggagacauaacaacagaucaugaagaaauccaaaacaccaucagauccuucuacaaaaggcuauacucaacaaaacuggaaaaccuggacgaaauggacaaauuucuggacagauaccagguaccaaaguugaaucaggaucaaguugaccuucuaaacagucccauauccccuaaagaaauagaagcaguuauaaauagucucccagccaaaaaaagcccaggaccagacggguuuagugcagaguucuaucagaccuucaaagaagaucuaauuccaguucugcacaaacuuuuucacaagauagaaguagaauguacucuacccaacucauuuuaugaagccacuauuacucugauaccuaaaccacagaaagauccaacaaagauagagaacuucagaccaauuucucuuaugaauaucgaugcaaaaauccucaauaaaauucucgcuaaccgaauccaagaacacauuaaagcaaucauccauccugaccaaguagguuuuauuccagggaugcagggaugguuuaauauacgaaaaucuaucaauguaauccauuauauaaauaaacucaaagacaaaaaccacaugaucaucucguuagaugcagaaaaagcauuugacaagauccaacacccauucaugauaaaaguucuggaaagaucaggaauucaaggcccauaccuaaacaugauaaaagcaaucuacagcaaaccaguagccaacaucaaaguaaauggagagaagcuggaagcaaucccacuaaaaucagggacuagacaaggcugcccacuuucucccuaccuuuucaacauaguacuugaaguauuagccagagcaauucgacaacaaaaggagaucaagggauacaaauuagaaaagaggaagucaaaauaucacuuuuugcagaugauaugauaguauauauaagugaccccaaaaauuccaccagagaacuccuaaaccugauaaacagcuucggugaaguagcuggauauaaaauaaacucaaagaagucaauggccuuucucuauacaaaaaauaaucaggcugagaaagaaauuagggaaacaacacccuucucaauagucacaaauaauauaaaauaucucggcgugacucuaacuaaggaagugaaagaacuguaugauaaaaacuucaagucucugaagaaagaaauuaaagaagaucucagaagauggaaggaucucacauguucauggauuggcaggaucaacauuguaaaaauggcuaucuugccaaaagcaauuuacagauucaaugcaauccccaucaaaauuccaacucaauucuucaaugaauuagaaguagcaauuugcaaauucaucuggaauaacaaaaaacccaggauagcaaaaacucuucucaaggauaaaagaaacucugguggaaucaccaugccugaccuaaagcuuuacuacagagcaauugugauaaaaacugcaugguacugguauagagacagacaaguagaccaauggaauagaauugaagacucagaaaugaacccacacaccuauggucacuugaucuucgacaagggagcuaaaaccauccaguggaagaaagacagcaucaucaacaauuggugcuggcacaacugguuguuaucauguagaagaaugcgaauugauccauacuuaucucccuguacuaaggucaaaucuaaguggaucaaggaacuucacuuaaaaccagagacacugaaacuuauagaggagaaaguggggaaaagccuugaagauaugggcacaggggaaaaauuccugaacagaacagcaauggcuugugcuguaagaucgagaauugacaaaugggaccuaaugaaacuccaaaguuucugcaaggcaaaagacaccgucaauaagacaaaaagaccaccaacagauugggaaaggaucuuuaccuauccuaaaucagauaggggacuaauauccaacauauauaaagaacucaagaagguggacuucagaaaaucaaauaaccccauuaaaaaauggggcucagaacugaacaaagaauucucaccugaggaauaccgaauggcagagaagcaccugaaaaaauguucaacauccuuaaucaucagggaaaugcaaaucaaaacaacccugagauuccaccucacaccagucagaauggcuaagaucaaaaauucaggugacagcagaugcuggcguggauguggagaaagaggaacacuccuccauuguuggugggauugcaggcuuguacaaccacucuggaaaucagucuggcgguuccucagaaaacuggacauaguacuaccggaggauccagcaauaccucuccugggcauauauccagaagaugccccaacugguaagaaggacacaugcuccacuauguucauagcagcccuauuuauaauagccagaagcuggaaagaacccagaugccccucaacagaggaauggauacagaaaaugugguacaucuacacaauggaguguuacucagcuauuaaaaagaaugaauuuaugaaauuccuagccaaauggauggaccuggagggcaucauccugagugagguaacacauucacaaaggaacucacacaauauguacucacugauaaguggauauuagcccaaaaccuaguauacccaagauacaagauacaauuuccuaaacacaugaaacucaagaagaaugaagacugaaguguggacacuaugccccuccuuagaagugggaacaaaacacccuuggaaggaguuacaaagacaaaguuuggagcugagaugaaaggauggaccauguagagacugccauauccagggauccaccccauaaucagcauccaaacgcugacaccauugcauacacuagcaagauuuuaucgaaaggacccagagguagcugucucuugugagacuaugccggggccuagcaaacacauaaguggaugcucacagucagcuauuggauggaucacagggcccccaauggaggagcuggagaaauuacccaaggagcuaaagggaacugcaacccuauagguggaacaacauuaugaacuaaccaguaccccggagcucuugacucuagcugcauauguaucaaaagauggccuagauaggccaucacuggaaagagaggcccauuggacacgcaaauuuuauaugccccaguacaggggaacgccagggccaaaaagggagaguggguggguaggggaguggggguggguggguaugggggacuuuugguauagcauuggaaauguaaaugagcuaaauaccuaauaaaaaauaaaaacaaaaaacaaaaaacaaacaacaacaacaacaaaaaacccaaaacaaacaaaucuacuucuaacaaucucacuagacuaugggggcuggaaaccagggcccccuucacuguuauuacuacuuucuucuuuuccaacauuacaagaccaugauacuauuuuugggaaaugucauauggaaaauugacaccuguucugcucauauguucccacacaggacaguuucaacagaauuugcauggcuuuucccaugucuuauuucuuuuguuccuacuuguugauauaaaagcaaagcaaagcaaagcaaagcaaagcaaagcaaagcaaagcaaagcaaagcaaagcaaagcaaagcaaagcaaaacaaaacaaaacaaaacaagccucacgaaacaguauagugucacuguauuagagaagaucagaaucccagccccagccacacagaagcaaugugagugagccucaggcccuugcuccugcuaaguucccauuggugaauuccuaaguggaaccauacuguggcuacugugaaaaacacggaagcggccacacaaaaaccacccugaaguaucaaauucuguuucuuuagcuguauuccuaggauuacuggaucauguggggauuuuacuuuaagucagaguguacauacugcuguguucugcucuguaggagagaagagaagagagagagagacauagauuugguaccuugugaucucaacuuuauuauuuuuuucuuaaaagugauagcaucaaaagaaccuaucuuuuuaaacuucugugggucucagaacauauaaugugugaauuuacuuagaaauguggauaaacuauugcaauuaucagguaauaauuuugccuaauagaaauagaguuacauacaucuuagaccagauuucugaguucacucagaucucagcuuguacuuguagaacaggauaucaaaaaagcucuuagaaguagaaaaaguguguguguguguguuuauguauguauguauuugugugugugcuugucuguguguuugugugcuuguguauaugugcauguauguguuuaugaguaggugugcuuauguauauguaugcaugcauguauacauuuguguuuuuguaaaguuuguauauuucuaccauacauauacacgcuagaaaauaucuggacuguguugcuaaguuuuuugagguaauaauuccugggaagagauuacuugacuuucugaagcucuaacauagacuacguauaauuugaaaggccaugagaguuaguauaacuuggaugcaaagacgacugugaauauaacacucuuuccagcucuaugacauaauauauuccaucuauuuccuucugggugcauaguccuacacugggguccuugauugccuguguucauuaaugaguuugugugucuacaucuggauaaaaagcuacggaaagacagacuauuguacaugucacacgaggaaacuggggcacuccuggauguugcagggauggcaaagaggggagggauaagaggugcagaaaaaaaaaaugagaauauaaaucccuaucuucaguuaaguggauucaaucuaaucuaaaagucuuucacuuugcuaaauauuugguauaggcuaguaguggagggugucugggccaucuggagacuucaggacaaacaggauggugaagagcuaggucccugggaagcugcagaaagaguucggcuuuccacagucuguggguacuuaacugaauuacacaugcacuuucaugaauaugauggggucuaaauuuacuauauuacauacguggccauauauuuauuucuauuguaauuuaacuuaccaguaggagaagcaacacauuuguugucuuguuuacuauaauguaauuguucauaagaaagauaaucuaaauuggauguacuuaaauugcugugugggaacaguucugccuuggggggacauuuguuagucucuaccagcacaucaguucaacagguuagugauaguggucagaauucugcuaugcacaagagagaccccuaagaauuccugaccccaaaccccaaaaauacuagcugguuuuguaugucaacuugacacagcuggaguuaucacagagaaagaagcgucccuugaggaaaugccuccaugagaucuagccguaaggcauuucucaauguggguggugccaugccuggacugguaguccuggguucuauaagaaagcaagcugagcaagccacacaaagcaauccaguaaggagcacuccuccauggccucugcaucagcuccugccucuaaguuccuguccugugugaguuccuguuccagcuuccuuuggugaugaacagcaauguggacguguuagcucaauaaacccuuuccucccuaacuugcuucuugaucauguuuugugcaggaacacaaagccugacuaagacacccaauuaggcccagccgcaaucuuguguuagaacaaucacuuacuuuacagagagaaacugagcaccaaaggggccagugauaugugcaaagucgcucugagcauauaagagagguagguccucuaguguauuuacaucgugccauuuagcuucaaagagcuaguauuccacauggaacugcugaaaaaccaauauugcugggaaccccuugcacuucagauaugguacauaacugcacaguaaacaucaguccacagcuagccauaguuaggccaggcaagaagaaacagagaauuuaauuauguaacaccuauucagauauuguaugaaaaccauuuucauaucugaccaaguuacugucccauguacuggaucuucacacaccucacuacugccuggagguuguaagaacuugcauuucuagaaccuacaaagggaaguucuaagugugucugcccugaggcccaaagacgggcauuuccaaauguuccauucagaugcugacauagcuaguagcuagcuuucucagaccacugagaaacacugccuaacauuugauggggaaauggcaaaugcuggucuaagaguaaacuugaaucucacccuucauguaaucucacuuuaagagugauuaauguuaauucacacaaaggacuauaaucauauaagugguaauuuagacauaauucaaauuucaaaaagucuaaaaaggaagaaaucuguagguuuuugauagccuauagagacaacauuaaggaauaaucauauguuauuugaggagaagagugauacccuaaauauaauaaguauuauauaaaaauauuauauauaaaauacccuaaauuggaagacauccaaacaaauaauauaaauauuauucuguaugcauucuuuauuuuuaacauuuuauuucugcuagacugagugaccuugaucuauugggccugccgagcuguaucuacggggaucguugcuauugacaucaguaauauaaaaucaggccuuuagggagccguaacugucucuucaaaugauuugggaaaauguguacaucuucaaucaauuaaauacaggacaaauuuagucaaucacaaaugaucaacacgccccuguucauugugcuuagcaguaugaaaauggcacccaggcaaauugauuucgguaacacuccuuuucauucuuuuaauucaauagugagaagaauauaaggcaguuuucaauguucuauccacaguaauccuguaguuagucugccuuacugcuuacaccagagcucauuugaagacacccaagcaaaugacaggaaacuuuuaacucuggucaagucccaaucacagacccuugcuugccaaggacacaaaggaagccaaacuuucaaacaugcugcauugaucuccaacuuuuuaaaucccucugucauuuuaaaugaggugcacucgguugugucaucaucucgguuuuaauugugugaaaauuuccugccaaucucacaccgcugcggcaaccucaccuugcuacuugcccugcaaguucugcagugugccguucugaguaugccguuuuaacuaguucuugcagcaggacacaaagcgagauagucugauagaaccaguucuccucugguuuuaccuuuacucuuagaugaguuaagggucacaucaaaccagggcucagcccgccagaucuccuaagcacagccccuccugacccaaugcaguuaacccaaccucauucagcgcuaguaucaaaugacacuggagcugcugcaguaugcaucccgagacuaaguaggcaggauuuauuaucagcagaaguccccuaacuaccagguuauucaagcuccguucuugucacaaacaggcgcggcggaagacacagugcagcagacucagagcucauuuacaagacaagcgaauucucaguuagagacaagggcagcgcggcagcgaacugcaguaaaucuuuucacgcucacagcaacaucuaacaaugcucuccugcaacgccucagaucaaacgaauccuacuugguuuaaacaucaaaucaacaccauaaaaaaggcuucauuagcaaaguucaauuuaggauguuuuuaaucgugucuuaauucuagaaccagugcgagacuuuccaugcuuauucaagcaugcugacagaauuggaaccucuuagaauugccuaccugcaccuaucagccuggcugacaggagcccgccaaaggauuaaaaaaaaacaaaacccaaaacauaaaaucaugcaaaaaaauauuuacccccgaaagauguauguaguuaaagcucagcuuccugcagccucgauagccccugaaguguuaaucugaagaaacaguuccaugaguuuccacaggccgguagugagucuccuacacuugaccuagacagacuuacau

SEQ ID NO: 13 - DNA, 123 bp, Mus musculus
gtttcattggtcagtttaacagcaaatgccttgggttactctgaactcggggccatcaaatccctaaggacactaagagctctgagacccctaagagccttatcacgatttgaagggatgagg

SEQ ID NO: 14 - DNA, 7597 bp, Mus musculus
gtaagaaaaaggaaaactctgcagcgttgtatattgtcaaagctaggctgagttcaacttaactaacgaaaaacacgtgcatgcaaaaggaatggcaaccctttgcaaacttgctactttacccttttctctgttgcatatttacttcttggtgatatgcaagagaaaatcggcctctttgaaaatgatttaatatcatttatctgctttgctaattaaaatgaccttagttcataatcgatcttgggagtttccttataattcctaatacaaagggggaggggcagatactctcttaaagaactaagttgagtcatgtaataattacctagagataattttgtttcatatcgttctcctctatgacagcccatcagtacttaagggatcctatggaaagtaatgtgaatcacaaatgtgtatgaatacaaaggaaaaaatgaagaattgttaaatgttttgtctttacaatgccaaaattctcattatttgaatatatccaagggcagatattaaccattgactggagtataataatactgcctcaactgtaactaaattaatgacattgaataagtaagacactaatttaattactataaatacatacacatcttatgacaatacagctgataaggaaaaagaacatgtatttttattcattgccatacatggctcgtcaaccttaacttaaacctcggttctcagttacacagagttttatgttgctcttttgagcaaagcattattcccctctccataattcaacacgtatcagatttttgcatttattggctcattgttatgatgattatttcaaagcattatacaatcatttatagaagatgtgccgtgtgaaaattatttttttattaagatccaaaatttacgctctttaaaccaatcagatgaaatgtataaggcaaagagtgctcattgtcctgacacttacaaaccaaggctccaacaaacaggctcctctctgcaccacatagagggctttcagcctgtgtccccccataaaaacctattataaattttattatactatactgtaagaaacctgtccaatttttaatttctctagcacatatgaaaacttctcttcagtagatccaagtaagcacaaaggagctttgattctcacacaagaaatcacatttgtattaaaaatgtatcataaattttctcccaattatgcaaaacttaaatgcttttccaattaaaagagcactttcgtttcagaatagcaatttcagttgtcaaggaaaacattgtttttatacattttatataaaaatacatgagctaaatttaaattcacatttttcaactttttatggtttttttatgtttctttttctttcgcattttttaacaatccagccattacctctcctccctgtccccctcctatagtttctcatctcattcctcctcccccttgcctctgagaggatgctccctccctcactaggcctccctcttccccagggcttcaagttcctcaaggattatacacatcttctcccactgagaccaggccaggcagtcctctgcttctgcccagcctgtgtatgttcctgcttggtagctcagtctctggaagctccctggggtctgggttagttgggactgctggtcttcctatggagttaccctccccttcaacttcttcaatccttcccctaattcaaccacaggtatccagacttcagtccaatggttgagtgtaaatattggcatctgtctctgtcagctgttgttaggggctcagaggacagccatgctaggctcctgcctacaagcagcacaccataacatcagtaatagtgtcaggcctttaatgaataatgctacgtatataaggttgttagattatacttcaactttgatcttttagaatattattaaatccagtcgtttattttttatatgtaatattgactttccataacaaatgagtctattttccttttgtgtagaaataactttatcaattattgttaataatgcttttgtcaattattgttgatatgcttctcttttttaaaactggagtcatcaaaacaaaaattctgggtagatattacgaagctgactccttggtcagcttggcacatagtgagaccacaaatatctcaaggtcacggcaattcctcaccaccagtttggcattgtgaagtcaaaaccaaccttctgttgattctggtttttgtatttctagtatgagacattttctactttgtaagagtatataactgtggatggcggcgaggttgggcatgatgatgattgtaagcgggaagtgagctagagtatcttcagaaactctcactttatcctccttggcagcatagaaccgcaatcgctgtgtccgagtgtcaaccaggcagtcattttgttttgggttttttgtcactctttcaaagcatgtgcttctacgcaacactaccaaacacagcatgctgcatagtgcttgagaaggagttagaaagtaacaaacgagttatcatcacgttgccctttgtgttttgcatgtcttatgcacacttttggctgacagcttttgaacatttattgtatttcaaatttccagtccaaatttttttttcaacttgtgaaattgaacggaatgaaccgatgtcgtgaatacctagggtcaaataaaacttgtatttaaattcgtagttttaatttcccaagctgggaaaatcgtaaaaaccttttccaaagaactcaagtcttagttgctagggaaacaggcagtgagcatcatatacaaaaagtaacaccaaatgttctgtcatatcagctttctaactaataataaactatatatttctattttatataggataatcttgctccaacttggatggggtggagcggtggttcctcccctcagccctttattatgggtactgtattaccccttttgctacctttaatccttgcactgtgacttatgtgtagtgggattgagggagggagtgggaagggtacaattgcaccacagtagggacaatacaggatttatttccaaatccactacttttaatgagcttaaacttcttttgggaaaaaaaaagttatctctgacttaccatctgtggattataaccccagaagtacatatctttattacgtttcactgaatatgatttagctatttatacttcattgtccatttatggggaaattactcaattggtgagggtgggggaccctggtgtaggatgctgatgaaaacgttttcatttgtcaagctcatggtagtgacagagcatatagtccttattttttcaacacactgctctggtccctcaatgggccagtcacattccatcagttgatcgttgatgtgtgcgagcagtggctaaaggtacaacaggccaggtatctcagggttgccaatggttatgatcattctcatctttattgcataaaaatgtgttatttgcagaaagtagcaaggcaagatccctgtgaaacaagggaatacaaaaaaaaaaaaagatgtgctttaagttataaaaccaaaacatgtgaaaagtcaacttcattgaagtataaagaataggatatgcatgaaaaacaaaaaaatcatgagcactaagaaattggtgtataagccaactccttgtaagctaccccaattaacttcccagaatcttagaaggcatcacagtgcaccccaaaataaaaagccaaactgacacttctgcttcctcttaaaatgtaggagtcttggataagaaagataatttttattgtttggaagaaaaaaaaattgtttggataattgaggcatttatctatcaaaaatatttatcttaataaaatttcacaacactgatttagttgttggcttttctaaaaattttttatatttcatattaagaactcatgatttttactttccattttttaaattcttattcacatatggtttttctctatttcttagaaaagctatagaacccatggtttccggtgacttaaaaaactaatctaaatgtcttcacttagatgatactttcaaatgcactgaaatttctaatatcaacaagaatatttgcctggtcctaatttttcactgatttaataaaaagtatgaaccctaaagaagaaatagacttgaagaactggttgtgtgacaatacagaaattctgctgggagatgtccttttaaaacattgttagaagagacaacctctacaatccacccattaagcatacttctctcttagacatctccttttatgtaccttataacctcaatgtgttctttccaattgacttagaccaacacttcccagcgcatcccacatgggagccaattactgactctccctagagactgcaaagaattaatattgtagaaccaagggatggttgggctcttgggagaggcaatccgtttgtgatcttttgctctggatgttaatgaaatcgcaactttaagtggattttcagtggcaaatcctctgatcctatgccaaatgttctctaagacaaacatccttgtaaaataaatgtctcactgggccaaatctatggcaaatttgcacgttttcctgaactgcattcctatatagtatttgccatcctgaattcactaatgggcattacttttaattcaaaaccagtcccttcttcaaaggaaatctctcccatttattacattatgcaaactgctttcttatgcagtggttaaatccttagccaggcaagtatgaggactggaatttggatatccagaaccctcagaaatgtcggatgggcatagtagcttacatgtaattccagagctagaaagatgaaactagccctgtcctcaagctctgaattcagttggtgcaataaataagaaagaatccccccccccgacccctacatctctttcctctacatctatacatgtatttcccatacagctctatgcttccacatatatgctcacatatgtgcatgcacacttgcacacatatgtacacttgacacattgaagcatcataatctaacaattggaatataagaaaatatttaactttcacacagagcagtcagagaaaaccataagaggttgaaactcttgaaaaaacttgcaggataaacagaaaagagtatgagatgccaattctggtctactttctgaacctaacttgttttaccttcattagtctaattttccaaatgaaccccaagcaccaaattgtccttattgctctttccagtactaaattataattcctcaattcgaaggcaaacactctcatctttgttaaggatgtgtagagttagactcaataaacgacatgtatatttgagctaaagcctggaggagggagattatttcaagggcaagtacttggcagggagtttcaaagaaagaaggctctcaattctcagactaacaccttagcgtggagtgactgtcacagaggagggtgaagtgtatgtcaccagttagggaagctgaaaggggaaatgtatcaggcttgtgagaatccttcagcagccaagtctagcacctgagcacaatccccagaactgaccccacatggtggaaaggagaggaataattcctgcaaattttcctgtgacctccacccaagtgctatagaaaatgcatgcatgcccacatgcacacacaaataaacatagttgcaaactgttttgaggaaaataacctcacaaactgtcgagtgatgtaaatgccaaagaaagagaaatgttttctaatggctagagaaccattaaggaatttttcaaaatgggacatgggatagataaatttagtatccatactgaaagaaggcaagcaaataaaatctgataagaatgtaattcttagtaaccgaggacagagcgaagatagagaacagggccaatggccaaggtggaaaggtttgaaggaagcagcatgaaacctacagacttgtaccaaaatgttcagtgtcatgagtgttaaaagtgaaaagcttgcatgttagtatggatttcatatcctcggcagacagagcacctcactgtgagtgggagatgaagtattcagaaatgagaaacaactactcaatttcagtgttcatatctcaaatccaataaacaactttaggggtacaattttttaaaaaattacattaaaatgtttttaaatctcttcttaataatttaaaaattaaattgaaaataactttaaaaagtaatatatacaggaaagcctgtgtgctaattttttagggaggccataaagggagatagttgctcattaatttctacacatcagcctatctttggcttctgccttgatagcgcactctgaattatcttcttcatgttcatccctcatctttattgttactggtttcatttcccttggccacatagcccactattttgtattccccaatggatattgttccttacaaagttcagccagggctcagaagtacaaggaattggctcttatacttctgtcagacaggcaaaaacttctaaaattatactataataaaaatcaaagagatgatattcataattaaactaacaaaagtggcaggccccccctcccccaacatgagtagaattaatctgacgtccatgttcaagtctgaaacacacttgccaattaagagcacattagggccagcctttatctccctcttagttactaatgtgcagttcaatggtgagctatagagaaggaagccaagactaccatatgtcaaatataaaaaaaaaaaatcccattttaaatctgtagtcccgaattaaggacaagagagagggaaatatctttgacattagaaaatggagaaaatattttagcacaggactttactcagtcacatcagagttgataagtacgtatgacatccctctttttcctgttttcctgagaaaatgatctctctagtgtttcatttaagataagtttattgaattaaactcagtaaatgaaacaactgacatgactggagcttgaaataaacgatgtgatgatctactgaaatacatgatgctaaattgtcttgcttcttatgcaaaaactactattagttatagcaatgcatggataattaaggccaaaaatatattagatgttaaaaatagttttatatttatacatctgaattttaatttatatttaaagtatattggtccaatcaattcatgcccaaatgttttagttctattctttgagatactgttttgttttgggatttttttttatgagctaatctcttgcctaggagttcctacttctctctcctccttttattttttctaataaactacacatgtgtcttcatccaggagctaacttctcccattttgcttttcctttagcaccttttttatattagatttctttcttttctccatctctttgcatattgcctatatttcttttcctaagcataatatttaaaaaagactgagttttatgttaagattatttctgctttgctcttacacagataggataagtagtcttgatagaaaataaatcaatgattcctagggggatgtctttttgcttttaatcaataaggattctgacttctctttctctccatttgtgtattag

SEQ ID NO: 15 - DNA, 282 bp, Mus musculus
gtggttgtgaatgccctgttaggagcaattccatccatcatgaatgtgcttctggtttgccttatattctggctaattttcagcatcatgggcgtaaatttgtttgctggcaaattctaccactgtgttaacaccacaactggtgacatatttgagatcagcgaagtcaataatcattctgattgcctaaaactaatagaaagaaatgagaccgcccggtggaaaaatgtgaaagtaaactttgataatgtaggatttgggtatctttctttgcttcaagtt

SEQ ID NO: 16 - DNA, 64 bp, Mus musculus
gataatcttgctccaacttggatggggtggagcggtggttcctcccctcagccctttattatgg

SEQ ID NO: 17 - RNA, 123 nt, Artificial Sequence
  Description of Artificial Sequence: Synthetic polynucleotide
guuucauuggucaguuuaacagcaaaugccuuggguuacucugaacucggggccaucaaaucccuaaggacacuaagagcucugagaccccuaagagccuuaucacgauuugaagggaugagg

SEQ ID NO: 18 - RNA, 7597 nt, Artificial Sequence
  Description of Artificial Sequence: Synthetic polynucleotide
guaagaaaaaggaaaacucugcagcguuguauauugucaaagcuaggcugaguucaacuuaacuaacgaaaaacacgugcaugcaaaaggaauggcaacccuuugcaaacuugcuacuuuacccuuuucucuguugcauauuuacuucuuggugauaugcaagagaaaaucggccucuuugaaaaugauuuaauaucauuuaucugcuuugcuaauuaaaaugaccuuaguucauaaucgaucuugggaguuuccuuauaauuccuaauacaaagggggaggggcagauacucucuuaaagaacuaaguugagucauguaauaauuaccuagagauaauuuuguuucauaucguucuccucuaugacagcccaucaguacuuaagggauccuauggaaaguaaugugaaucacaaauguguaugaauacaaaggaaaaaaugaagaauuguuaaauguuuugucuuuacaaugccaaaauucucauuauuugaauauauccaagggcagauauuaaccauugacuggaguauaauaauacugccucaacuguaacuaaauuaaugacauugaauaaguaagacacuaauuuaauuacuauaaauacauacacaucuuaugacaauacagcugauaaggaaaaagaacauguauuuuuauucauugccauacauggcucgucaaccuuaacuuaaaccucgguucucaguuacacagaguuuuauguugcucuuuugagcaaagcauuauuccccucuccauaauucaacacguaucagauuuuugcauuuauuggcucauuguuaugaugauuauuucaaagcauuauacaaucauuuauagaagaugugccgugugaaaauuauuuuuuuauuaagauccaaaauuuacgcucuuuaaaccaaucagaugaaauguauaaggcaaagagugcucauuguccugacacuuacaaaccaaggcuccaacaaacaggcuccucucugcaccacauagagggcuuucagccuguguccccccauaaaaaccuauuauaaauuuuauuauacuauacuguaagaaaccuguccaauuuuuaauuucucuagcacauaugaaaacuucucuucaguagauccaaguaagcacaaaggagcuuugauucucacacaagaaaucacauuuguauuaaaaauguaucauaaauuuucucccaauuaugcaaaacuuaaaugcuuuuccaauuaaaagagcacuuucguuucagaauagcaauuucaguugucaaggaaaacauuguuuuuauacauuuuauauaaaaauacaugagcuaaauuuaaauucacauuuuucaacuuuuuaugguuuuuuuauguuucuuuuucuuucgcauuuuuuaacaauccagccauuaccucuccucccugucccccuccuauaguuucucaucucauuccuccucccccuugccucugagaggaugcucccucccucacuaggccucccucuuccccagggcuucaaguuccucaaggauuauacacaucuucucccacugagaccaggccaggcaguccucugcuucugcccagccuguguauguuccugcuugguagcucagucucuggaagcucccuggggucuggguuaguugggacugcuggucuuccuauggaguuacccuccccuucaacuucuucaauccuuccccuaauucaaccacagguauccagacuucaguccaaugguugaguguaaauauuggcaucugucucugucagcuguuguuaggggcucagaggacagccaugcuaggcuccugccuacaagcagcacaccauaacaucaguaauagugucaggccuuuaaugaauaaugcuacguauauaagguuguuagauuauacuucaacuuugaucuuuuagaauauuauuaaauccagucguuuauuuuuuauauguaauauugacuuuccauaacaaaugagucuauuuuccuuuuguguagaaauaacuuuaucaauuauuguuaauaaugcuuuugucaauuauuguugauaugcuucucuuuuuuaaaacuggagucaucaaaacaaaaauucuggguagauauuacgaagcugacuccuuggucagcuuggcacauagugagaccacaaauaucucaaggucacggcaauuccucaccaccaguuuggcauugugaagucaaaaccaaccuucuguugauucugguuuuuguauuucuaguaugagacauuuucuacuuuguaagaguauauaacuguggauggcggcgagguugggcaugaugaugauuguaagcgggaagugagcuagaguaucuucagaaacucucacuuuauccuccuuggcagcauagaaccgcaaucgcuguguccgagugucaaccaggcagucauuuuguuuuggguuuuuugucacucuuucaaagcaugugcuucuacgcaacacuaccaaacacagcaugcugcauagugcuugagaaggaguuagaaaguaacaaacgaguuaucaucacguugcccuuuguguuuugcaugucuuaugcacacuuuuggcugacagcuuuugaacauuuauuguauuucaaauuuccaguccaaauuuuuuuuucaacuugugaaauugaacggaaugaaccgaugucgugaauaccuagggucaaauaaaacuuguauuuaaauucguaguuuuaauuucccaagcugggaaaaucguaaaaaccuuuuccaaagaacucaagucuuaguugcuagggaaacaggcagugagcaucauauacaaaaaguaacaccaaauguucugucauaucagcuuucuaacuaauaauaaacuauauauuucuauuuuauauaggauaaucuugcuccaacuuggaugggguggagcggugguuccuccccucagcccuuuauuauggguacuguauuaccccuuuugcuaccuuuaauccuugcacugugacuuauguguagugggauugagggagggagugggaaggguacaauugcaccacaguagggacaauacaggauuuauuuccaaauccacuacuuuuaaugagcuuaaacuucuuuugggaaaaaaaaaguuaucucugacuuaccaucuguggauuauaaccccagaaguacauaucuuuauuacguuucacugaauaugauuuagcuauuuauacuucauuguccauuuauggggaaauuacucaauuggugagggugggggacccugguguaggaugcugaugaaaacguuuucauuugucaagcucaugguagugacagagcauauaguccuuauuuuuucaacacacugcucuggucccucaaugggccagucacauuccaucaguugaucguugaugugugcgagcaguggcuaaagguacaacaggccagguaucucaggguugccaaugguuaugaucauucucaucuuuauugcauaaaaauguguuauuugcagaaaguagcaaggcaagaucccugugaaacaagggaauacaaaaaaaaaaaaagaugugcuuuaaguuauaaaaccaaaacaugugaaaagucaacuucauugaaguauaaagaauaggauaugcaugaaaaacaaaaaaaucaugagcacuaagaaauugguguauaagccaacuccuuguaagcuaccccaauuaacuucccagaaucuuagaaggcaucacagugcaccccaaaauaaaaagccaaacugacacuucugcuuccucuuaaaauguaggagucuuggauaagaaagauaauuuuuauuguuuggaagaaaaaaaaauuguuuggauaauugaggcauuuaucuaucaaaaauauuuaucuuaauaaaauuucacaacacugauuuaguuguuggcuuuucuaaaaauuuuuuauauuucauauuaagaacucaugauuuuuacuuuccauuuuuuaaauucuuauucacauaugguuuuucucuauuucuuagaaaagcuauagaacccaugguuuccggugacuuaaaaaacuaaucuaaaugucuucacuuagaugauacuuucaaaugcacugaaauuucuaauaucaacaagaauauuugccugguccuaauuuuucacugauuuaauaaaaaguaugaacccuaaagaagaaauagacuugaagaacugguugugugacaauacagaaauucugcugggagauguccuuuuaaaacauuguuagaagagacaaccucuacaauccacccauuaagcauacuucucucuuagacaucuccuuuuauguaccuuauaaccucaauguguucuuuccaauugacuuagaccaacacuucccagcgcaucccacaugggagccaauuacugacucucccuagagacugcaaagaauuaauauuguagaaccaagggaugguugggcucuugggagaggcaauccguuugugaucuuuugcucuggauguuaaugaaaucgcaacuuuaaguggauuuucaguggcaaauccucugauccuaugccaaauguucucuaagacaaacauccuuguaaaauaaaugucucacugggccaaaucuauggcaaauuugcacguuuuccugaacugcauuccuauauaguauuugccauccugaauucacuaaugggcauuacuuuuaauucaaaaccagucccuucuucaaaggaaaucucucccauuuauuacauuaugcaaacugcuuucuuaugcagugguuaaauccuuagccaggcaaguaugaggacuggaauuuggauauccagaacccucagaaaugucggaugggcauaguagcuuacauguaauuccagagcuagaaagaugaaacuagcccuguccucaagcucugaauucaguuggugcaauaaauaagaaagaauccccccccccgaccccuacaucucuuuccucuacaucuauacauguauuucccauacagcucuaugcuuccacauauaugcucacauaugugcaugcacacuugcacacauauguacacuugacacauugaagcaucauaaucuaacaauuggaauauaagaaaauauuuaacuuucacacagagcagucagagaaaaccauaagagguugaaacucuugaaaaaacuugcaggauaaacagaaaagaguaugagaugccaauucuggucuacuuucugaaccuaacuuguuuuaccuucauuagucuaauuuuccaaaugaaccccaagcaccaaauuguccuuauugcucuuuccaguacuaaauuauaauuccucaauucgaaggcaaacacucucaucuuuguuaaggauguguagaguuagacucaauaaacgacauguauauuugagcuaaagccuggaggagggagauuauuucaagggcaaguacuuggcagggaguuucaaagaaagaaggcucucaauucucagacuaacaccuuagcguggagugacugucacagaggagggugaaguguaugucaccaguuagggaagcugaaaggggaaauguaucaggcuugugagaauccuucagcagccaagucuagcaccugagcacaauccccagaacugaccccacaugguggaaaggagaggaauaauuccugcaaauuuuccugugaccuccacccaagugcuauagaaaaugcaugcaugcccacaugcacacacaaauaaacauaguugcaaacuguuuugaggaaaauaaccucacaaacugucgagugauguaaaugccaaagaaagagaaauguuuucuaauggcuagagaaccauuaaggaauuuuucaaaaugggacaugggauagauaaauuuaguauccauacugaaagaaggcaagcaaauaaaaucugauaagaauguaauucuuaguaaccgaggacagagcgaagauagagaacagggccaauggccaagguggaaagguuugaaggaagcagcaugaaaccuacagacuuguaccaaaauguucagugucaugaguguuaaaagugaaaagcuugcauguuaguauggauuucauauccucggcagacagagcaccucacugugagugggagaugaaguauucagaaaugagaaacaacuacucaauuucaguguucauaucucaaauccaauaaacaacuuuagggguacaauuuuuuaaaaaauuacauuaaaauguuuuuaaaucucuucuuaauaauuuaaaaauuaaauugaaaauaacuuuaaaaaguaauauauacaggaaagccugugugcuaauuuuuuagggaggccauaaagggagauaguugcucauuaauuucuacacaucagccuaucuuuggcuucugccuugauagcgcacucugaauuaucuucuucauguucaucccucaucuuuauuguuacugguuucauuucccuuggccacauagcccacuauuuuguauuccccaauggauauuguuccuuacaaaguucagccagggcucagaaguacaaggaauuggcucuuauacuucugucagacaggcaaaaacuucuaaaauuauacuauaauaaaaaucaaagagaugauauucauaauuaaacuaacaaaaguggcaggcccccccucccccaacaugaguagaauuaaucugacguccauguucaagucugaaacacacuugccaauuaagagcacauuagggccagccuuuaucucccucuuaguuacuaaugugcaguucaauggugagcuauagagaaggaagccaagacuaccauaugucaaauauaaaaaaaaaaaaucccauuuuaaaucuguagucccgaauuaaggacaagagagagggaaauaucuuugacauuagaaaauggagaaaauauuuuagcacaggacuuuacucagucacaucagaguugauaaguacguaugacaucccucuuuuuccuguuuuccugagaaaaugaucucucuaguguuucauuuaagauaaguuuauugaauuaaacucaguaaaugaaacaacugacaugacuggagcuugaaauaaacgaugugaugaucuacugaaauacaugaugcuaaauugucuugcuucuuaugcaaaaacuacuauuaguuauagcaaugcauggauaauuaaggccaaaaauauauuagauguuaaaaauaguuuuauauuuauacaucugaauuuuaauuuauauuuaaaguauauugguccaaucaauucaugcccaaauguuuuaguucuauucuuugagauacuguuuuguuuugggauuuuuuuuuaugagcuaaucucuugccuaggaguuccuacuucucucuccuccuuuuauuuuuucuaauaaacuacacaugugucuucauccaggagcuaacuucucccauuuugcuuuuccuuuagcaccuuuuuuauauuagauuucuuucuuuucuccaucucuuugcauauugccuauauuucuuuuccuaagcauaauauuuaaaaaagacugaguuuuauguuaagauuauuucugcuuugcucuuacacagauaggauaaguagucuugauagaaaauaaaucaaugauuccuagggggaugucuuuuugcuuuuaaucaauaaggauucugacuucucuuucucuccauuuguguauuag

SEQ ID NO: 19 - RNA, 282 nt, Artificial Sequence
  Description of Artificial Sequence: Synthetic polynucleotide
gugguugugaaugcccuguuaggagcaauuccauccaucaugaaugugcuucugguuugccuuauauucuggcuaauuuucagcaucaugggcguaaauuuguuugcuggcaaauucuaccacuguguuaacaccacaacuggugacauauuugagaucagcgaagucaauaaucauucugauugccuaaaacuaauagaaagaaaugagaccgcccgguggaaaaaugugaaaguaaacuuugauaauguaggauuuggguaucuuucuuugcuucaaguu

SEQ ID NO: 20 - RNA, 64 nt, Artificial Sequence
  Description of Artificial Sequence: Synthetic oligonucleotide
gauaaucuugcuccaacuuggaugggguggagcggugguuccuccccucagcccuuuauuaugg

SEQ ID NO: 21 - DNA, 18 bp, Artificial Sequence
  Description of Artificial Sequence: Synthetic oligonucleotide
gatgctctccgtctgttt

SEQ ID NO: 22 - DNA, 18 bp, Artificial Sequence
  Description of Artificial Sequence: Synthetic oligonucleotide
ttcatgatgctctccgtc

SEQ ID NO: 23 - DNA, 18 bp, Artificial Sequence
  Description of Artificial Sequence: Synthetic oligonucleotide
ttttgttcatgatgctct

SEQ ID NO: 24 - DNA, 18 bp, Artificial Sequence
  Description of Artificial Sequence: Synthetic oligonucleotide
ttactttttgttcatgat

SEQ ID NO: 25 - DNA, 18 bp, Artificial Sequence
  Description of Artificial Sequence: Synthetic oligonucleotide
tggtgttactttttgttc

SEQ ID NO: 26 - DNA, 18 bp, Artificial Sequence
  Description of Artificial Sequence: Synthetic oligonucleotide
acatttggtgttactttt

SEQ ID NO: 27 - DNA, 18 bp, Artificial Sequence
  Description of Artificial Sequence: Synthetic oligonucleotide
acagaacatttggtgtta

SEQ ID NO: 28 - DNA, 18 bp, Artificial Sequence
  Description of Artificial Sequence: Synthetic oligonucleotide
atatgacagaacatttgg

SEQ ID NO: 29 - DNA, 18 bp, Artificial Sequence
  Description of Artificial Sequence: Synthetic oligonucleotide
atctgatatgacagaaca

SEQ ID NO: 30 - DNA, 18 bp, Artificial Sequence
  Description of Artificial Sequence: Synthetic oligonucleotide
tagaaatctgatatgaca

SEQ ID NO: 31 - DNA, 18 bp, Artificial Sequence
  Description of Artificial Sequence: Synthetic oligonucleotide
ttagttagaaatctgata

SEQ ID NO: 32 - DNA, 18 bp, Artificial Sequence
  Description of Artificial Sequence: Synthetic oligonucleotide
tgttattagttagaaatc

SEQ ID NO: 33 - DNA, 18 bp, Artificial Sequence
  Description of Artificial Sequence: Synthetic oligonucleotide
tagtttgttattagttag

SEQ ID NO: 34 - DNA, 18 bp, Artificial Sequence
  Description of Artificial Sequence: Synthetic oligonucleotide
atatatagtttgttatta

SEQ ID NO: 35 - DNA, 18 bp, Artificial Sequence
  Description of Artificial Sequence: Synthetic oligonucleotide
tagaaatatatagtttgt

SEQ ID NO: 36 - DNA, 18 bp, Artificial Sequence
  Description of Artificial Sequence: Synthetic oligonucleotide
caaaatagaaatatatag

SEQ ID NO: 37 - DNA, 18 bp, Artificial Sequence
  Description of Artificial Sequence: Synthetic oligonucleotide
atacaaaatagaaatata

SEQ ID NO: 38 - DNA, 18 bp, Artificial Sequence
  Description of Artificial Sequence: Synthetic oligonucleotide
ctatacaaaatagaaata

SEQ ID NO: 39 - DNA, 18 bp, Artificial Sequence
  Description of Artificial Sequence: Synthetic oligonucleotide
tcctatacaaaatagaaa

SEQ ID NO: 40 - DNA, 18 bp, Artificial Sequence
  Description of Artificial Sequence: Synthetic oligonucleotide
tatcctatacaaaataga

SEQ ID NO: 41 - DNA, 18 bp, Artificial Sequence
  Description of Artificial Sequence: Synthetic oligonucleotide
attatcctatacaaaata

SEQ ID NO: 42 - DNA, 18 bp, Artificial Sequence
  Description of Artificial Sequence: Synthetic oligonucleotide
agttggagcaagattatc

SEQ ID NO: 43 - DNA, 18 bp, Artificial Sequence
  Description of Artificial Sequence: Synthetic oligonucleotide
atccaagttggagcaaga

SEQ ID NO: 44 - DNA, 18 bp, Artificial Sequence
  Description of Artificial Sequence: Synthetic oligonucleotide
accccatccaagttggag

SEQ ID NO: 45 - DNA, 18 bp, Artificial Sequence
  Description of Artificial Sequence: Synthetic oligonucleotide
gctccaccccatccaagt

SEQ ID NO: 46 - DNA, 18 bp, Artificial Sequence
  Description of Artificial Sequence: Synthetic oligonucleotide
ccagcgctccaccccatc

SEQ ID NO: 47 - DNA, 18 bp, Artificial Sequence
  Description of Artificial Sequence: Synthetic oligonucleotide
gaaccagcgctccacccc

SEQ ID NO: 48 - DNA, 18 bp, Artificial Sequence
  Description of Artificial Sequence: Synthetic oligonucleotide
gggaggaaccagcgctcc

SEQ ID NO: 49 - DNA, 18 bp, Artificial Sequence
  Description of Artificial Sequence: Synthetic oligonucleotide
ataataaagggctcaggg

SEQ ID NO: 50 - DNA, 18 bp, Artificial Sequence
  Description of Artificial Sequence: Synthetic oligonucleotide
ccataataaagggctcag

SEQ ID NO: 51 - DNA, 18 bp, Artificial Sequence
  Description of Artificial Sequence: Synthetic oligonucleotide
gtaatacagtacccataa

SEQ ID NO: 52 - DNA, 18 bp, Artificial Sequence
  Description of Artificial Sequence: Synthetic oligonucleotide
gggtaatacagtacccat

SEQ ID NO: 53 - DNA, 18 bp, Artificial Sequence
  Description of Artificial Sequence: Synthetic oligonucleotide
ttaaaggtagcaaaaggg

SEQ ID NO: 54 - DNA, 18 bp, Artificial Sequence
  Description of Artificial Sequence: Synthetic oligonucleotide
aaggattaaaggtagcaa

SEQ ID NO: 55 - DNA, 18 bp, Artificial Sequence
  Description of Artificial Sequence: Synthetic oligonucleotide
agtgcaaggattaaaggt

SEQ ID NO: 56 - DNA, 18 bp, Artificial Sequence
  Description of Artificial Sequence: Synthetic oligonucleotide
gtcacagtgcaaggatta

SEQ ID NO: 57 - DNA, 18 bp, Artificial Sequence
  Description of Artificial Sequence: Synthetic oligonucleotide
cataagtcacagtgcaag

SEQ ID NO: 58 - DNA, 18 bp, Artificial Sequence
  Description of Artificial Sequence: Synthetic oligonucleotide
ctacacataagtcacagt

SEQ ID NO: 59 - DNA, 18 bp, Artificial Sequence
  Description of Artificial Sequence: Synthetic oligonucleotide
ccccactacacataagtc

SEQ ID NO: 60 - DNA, 18 bp, Artificial Sequence
  Description of Artificial Sequence: Synthetic oligonucleotide
cctcaccccactacacat

SEQ ID NO: 61 - DNA, 18 bp, Artificial Sequence
  Description of Artificial Sequence: Synthetic oligonucleotide
ccctccctcaccccacta

SEQ ID NO: 62 - DNA, 18 bp, Artificial Sequence
  Description of Artificial Sequence: Synthetic oligonucleotide
ccaatccctccctcaccc

SEQ ID NO: 63 - DNA, 18 bp, Artificial Sequence
  Description of Artificial Sequence: Synthetic oligonucleotide
ccttcccaatccctccct

SEQ ID NO: 64 - DNA, 18 bp, Artificial Sequence
  Description of Artificial Sequence: Synthetic oligonucleotide
agtacccttcccaatccc

SEQ ID NO: 65 - DNA, 18 bp, Artificial Sequence
  Description of Artificial Sequence: Synthetic oligonucleotide
ataatagtacccttccca

SEQ ID NO: 66 - DNA, 18 bp, Artificial Sequence
  Description of Artificial Sequence: Synthetic oligonucleotide
gtgcaataatagtaccct

SEQ ID NO: 67 - DNA, 18 bp, Artificial Sequence
  Description of Artificial Sequence: Synthetic oligonucleotide
ctgtggtgcaataatagt

SEQ ID NO: 68 - DNA, 18 bp, Artificial Sequence
  Description of Artificial Sequence: Synthetic oligonucleotide
gatgctcactgcctgttt

SEQ ID NO: 69 - DNA, 18 bp, Artificial Sequence
  Description of Artificial Sequence: Synthetic oligonucleotide
tatatgatgctcactgcc

SEQ ID NO: 70 - DNA, 18 bp, Artificial Sequence
  Description of Artificial Sequence: Synthetic oligonucleotide
ttttgtatatgatgctca

SEQ ID NO: 71 - DNA, 18 bp, Artificial Sequence
  Description of Artificial Sequence: Synthetic oligonucleotide
ttactttttgtatatgat

SEQ ID NO: 72 - DNA, 18 bp, Artificial Sequence
  Description of Artificial Sequence: Synthetic oligonucleotide
tggtgttactttttgtat

SEQ ID NO: 73 - DNA, 18 bp, Artificial Sequence
  Description of Artificial Sequence: Synthetic oligonucleotide
acatttggtgttactttt

SEQ ID NO: 74 - DNA, 18 bp, Artificial Sequence
  Description of Artificial Sequence: Synthetic oligonucleotide
acagaacatttggtgtta

SEQ ID NO: 75 - DNA, 18 bp, Artificial Sequence
  Description of Artificial Sequence: Synthetic oligonucleotide
atatgacagaacatttgg

SEQ ID NO: 76 - DNA, 18 bp, Artificial Sequence
  Description of Artificial Sequence: Synthetic oligonucleotide
agctgatatgacagaaca

SEQ ID NO: 77 - DNA, 18 bp, Artificial Sequence
  Description of Artificial Sequence: Synthetic oligonucleotide
tagaaagctgatatgaca

SEQ ID NO: 78 - DNA, 18 bp, Artificial Sequence
  Description of Artificial Sequence: Synthetic oligonucleotide
ttagttagaaagctgata

SEQ ID NO: 79 - DNA, 18 bp, Artificial Sequence
  Description of Artificial Sequence: Synthetic oligonucleotide
tattattagttagaaagc

SEQ ID NO: 80 - DNA, 18 bp, Artificial Sequence
  Description of Artificial Sequence: Synthetic oligonucleotide
tagtttattattagttag

SEQ ID NO: 81 - DNA, 18 bp, Artificial Sequence
  Description of Artificial Sequence: Synthetic oligonucleotide
atatatagtttattatta

SEQ ID NO: 82 - DNA, 18 bp, Artificial Sequence
  Description of Artificial Sequence: Synthetic oligonucleotide
tagaaatatatagtttat

SEQ ID NO: 83 - DNA, 18 bp, Artificial Sequence
  Description of Artificial Sequence: Synthetic oligonucleotide
taaaatagaaatatatag

SEQ ID NO: 84 - DNA, 18 bp, Artificial Sequence
  Description of Artificial Sequence: Synthetic oligonucleotide
atataaaatagaaatata

SEQ ID NO: 85 - DNA, 18 bp, Artificial Sequence
  Description of Artificial Sequence: Synthetic oligonucleotide
ctatataaaatagaaata

SEQ ID NO: 86 - DNA, 18 bp, Artificial Sequence
  Description of Artificial Sequence: Synthetic oligonucleotide
tcctatataaaatagaaa

SEQ ID NO: 87 - DNA, 18 bp, Artificial Sequence
  Description of Artificial Sequence: Synthetic oligonucleotide
tatcctatataaaataga

SEQ ID NO: 88 - DNA, 18 bp, Artificial Sequence
  Description of Artificial Sequence: Synthetic oligonucleotide
attatcctatataaaata

SEQ ID NO: 89 - DNA, 18 bp, Artificial Sequence
  Description of Artificial Sequence: Synthetic oligonucleotide
agttggagcaagattatc

SEQ ID NO: 90 - DNA, 18 bp, Artificial Sequence
  Description of Artificial Sequence: Synthetic oligonucleotide
atccaagttggagcaaga

SEQ ID NO: 91 - DNA, 18 bp, Artificial Sequence
  Description of Artificial Sequence: Synthetic oligonucleotide
accccatccaagttggag

SEQ ID NO: 92 - DNA, 18 bp, Artificial Sequence
  Description of Artificial Sequence: Synthetic oligonucleotide
gctccaccccatccaagt

SEQ ID NO: 93 - DNA, 18 bp, Artificial Sequence
  Description of Artificial Sequence: Synthetic oligonucleotide
ccaccgctccaccccatc

SEQ ID NO: 94 - DNA, 18 bp, Artificial Sequence
  Description of Artificial Sequence: Synthetic oligonucleotide
gaaccaccgctccacccc

SEQ ID NO: 95 - DNA, 18 bp, Artificial Sequence
  Description of Artificial Sequence: Synthetic oligonucleotide
gggaggaaccaccgctcc

SEQ ID NO: 96 - DNA, 18 bp, Artificial Sequence
  Description of Artificial Sequence: Synthetic oligonucleotide
ataataaagggctgaggg

SEQ ID NO: 97 - DNA, 18 bp, Artificial Sequence
  Description of Artificial Sequence: Synthetic oligonucleotide
ccataataaagggctgag

SEQ ID NO: 98 - DNA, 18 bp, Artificial Sequence
  Description of Artificial Sequence: Synthetic oligonucleotide
gtaatacagtacccataa

SEQ ID NO: 99 - DNA, 18 bp, Artificial Sequence
  Description of Artificial Sequence: Synthetic oligonucleotide
gggtaatacagtacccat

SEQ ID NO: 100 - DNA, 18 bp, Artificial Sequence
  Description of Artificial Sequence: Synthetic oligonucleotide
ttaaaggtagcaaaaggg

SEQ ID NO: 101 - DNA, 18 bp, Artificial Sequence
  Description of Artificial Sequence: Synthetic oligonucleotide
aaggattaaaggtagcaa

SEQ ID NO: 102 - DNA, 18 bp, Artificial Sequence
  Description of Artificial Sequence: Synthetic oligonucleotide
agtgcaaggattaaaggt

SEQ ID NO: 103 - DNA, 18 bp, Artificial Sequence
  Description of Artificial Sequence: Synthetic oligonucleotide
gtcacagtgcaaggatta

SEQ ID NO: 104 - DNA, 18 bp, Artificial Sequence
  Description of Artificial Sequence: Synthetic oligonucleotide
cataagtcacagtgcaag

SEQ ID NO: 105 - DNA, 18 bp, Artificial Sequence
  Description of Artificial Sequence: Synthetic oligonucleotide
ctacacataagtcacagt

SEQ ID NO: 106 - DNA, 18 bp, Artificial Sequence
  Description of Artificial Sequence: Synthetic oligonucleotide
tcccactacacataagtc

SEQ ID NO: 107 - DNA, 18 bp, Artificial Sequence
  Description of Artificial Sequence: Synthetic oligonucleotide
ctcaatcccactacacat

SEQ ID NO: 108 - DNA, 18 bp, Artificial Sequence
  Description of Artificial Sequence: Synthetic oligonucleotide
cctccctcaatcccacta

SEQ ID NO: 109 - DNA, 18 bp, Artificial Sequence
  Description of Artificial Sequence: Synthetic oligonucleotide
cactccctccctcaatcc

SEQ ID NO: 110 - DNA, 18 bp, Artificial Sequence
  Description of Artificial Sequence: Synthetic oligonucleotide
cttcccactccctccctc

SEQ ID NO: 111 - DNA, 18 bp, Artificial Sequence
  Description of Artificial Sequence: Synthetic oligonucleotide
gtacccttcccactccct

SEQ ID NO: 112 - DNA, 18 bp, Artificial Sequence
  Description of Artificial Sequence: Synthetic oligonucleotide
caattgtacccttcccac

SEQ ID NO: 113 - DNA, 18 bp, Artificial Sequence
  Description of Artificial Sequence: Synthetic oligonucleotide
tggtgcaattgtaccctt

SEQ ID NO: 114 - DNA, 18 bp, Artificial Sequence
  Description of Artificial Sequence: Synthetic oligonucleotide
tactgtggtgcaattgta

SEQ ID NO: 115 - RNA, 18 nt, Artificial Sequence
  Description of Artificial Sequence: Synthetic oligonucleotide
cagagaaaauaguguuca

SEQ ID NO: 116 - RNA, 18 nt, Artificial Sequence
  Description of Artificial Sequence: Synthetic oligonucleotide
auauucagagaaaauagu

SEQ ID NO: 117 - RNA, 18 nt, Artificial Sequence
  Description of Artificial Sequence: Synthetic oligonucleotide
uaaaaauauucagagaaa

SEQ ID NO: 118 - RNA, 18 nt, Artificial Sequence
  Description of Artificial Sequence: Synthetic oligonucleotide
aacaauaaaaauauucag

SEQ ID NO: 119 - RNA, 18 nt, Artificial Sequence
  Description of Artificial Sequence: Synthetic oligonucleotide
uuccaaacaauaaaaaua

SEQ ID NO: 120 - RNA, 18 nt, Artificial Sequence
  Description of Artificial Sequence: Synthetic oligonucleotide
uauuauuccaaacaauaa

SEQ ID NO: 121 - RNA, 18 nt, Artificial Sequence
  Description of Artificial Sequence: Synthetic oligonucleotide
uuuguuauuauuccaaac

SEQ ID NO: 122 - RNA, 18 nt, Artificial Sequence
  Description of Artificial Sequence: Synthetic oligonucleotide
auuauuuuguuauuauuc

SEQ ID NO: 123 - RNA, 18 nt, Artificial Sequence
  Description of Artificial Sequence: Synthetic oligonucleotide
augucauuauuuuguuau

SEQ ID NO: 124 - RNA, 18 nt, Artificial Sequence
  Description of Artificial Sequence: Synthetic oligonucleotide
gauguaugucauuauuuu

SEQ ID NO: 125 - RNA, 18 nt, Artificial Sequence
  Description of Artificial Sequence: Synthetic oligonucleotide
uaauagauguaugucauu

SEQ ID NO: 126 - RNA, 18 nt, Artificial Sequence
  Description of Artificial Sequence: Synthetic oligonucleotide
cuaaauaauagauguaug

SEQ ID NO: 127 - RNA, 18 nt, Artificial Sequence
  Description of Artificial Sequence: Synthetic oligonucleotide
aggaacuaaauaauagau

SEQ ID NO: 128 - RNA, 18 nt, Artificial Sequence
  Description of Artificial Sequence: Synthetic oligonucleotide
uucuuaggaacuaaauaa

SEQ ID NO: 129 - RNA, 18 nt, Artificial Sequence
  Description of Artificial Sequence: Synthetic oligonucleotide
acuuuuucuuaggaacua

SEQ ID NO: 130 - RNA, 18 nt, Artificial Sequence
  Description of Artificial Sequence: Synthetic oligonucleotide
uauauacuuuuucuuagg

SEQ ID NO: 131 - RNA, 18 nt, Artificial Sequence
  Description of Artificial Sequence: Synthetic oligonucleotide
ugcauguuuuacuuugga

SEQ ID NO: 132 - RNA, 18 nt, Artificial Sequence
  Description of Artificial Sequence: Synthetic oligonucleotide
guuuuacuuuggaguaaa

SEQ ID NO: 133 - RNA, 18 nt, Artificial Sequence
  Description of Artificial Sequence: Synthetic oligonucleotide
acuuuggaguaaaaauaa

SEQ ID NO: 134 - RNA, 18 nt, Artificial Sequence
  Description of Artificial Sequence: Synthetic oligonucleotide
ggaguaaaaauaauuuag

SEQ ID NO: 135 - RNA, 18 nt, Artificial Sequence
  Description of Artificial Sequence: Synthetic oligonucleotide
aaaaauaauuuagaccug

SEQ ID NO: 136 - RNA, 18 nt, Artificial Sequence
  Description of Artificial Sequence: Synthetic oligonucleotide
uaauuuagaccugauguu

SEQ ID NO: 137 - RNA, 18 nt, Artificial Sequence
  Description of Artificial Sequence: Synthetic oligonucleotide
uagaccugauguuuaaua

SEQ ID NO: 138 - RNA, 18 nt, Artificial Sequence
  Description of Artificial Sequence: Synthetic oligonucleotide
cugauguuuaauaaauau

SEQ ID NO: 139 - RNA, 18 nt, Artificial Sequence
  Description of Artificial Sequence: Synthetic oligonucleotide
guuuaauaaauauucuua

SEQ ID NO: 140 - RNA, 18 nt, Artificial Sequence
  Description of Artificial Sequence: Synthetic oligonucleotide
auaaauauucuuacugau

SEQ ID NO: 141 - RNA, 18 nt, Artificial Sequence
  Description of Artificial Sequence: Synthetic oligonucleotide
uauucuuacugauauaau

SEQ ID NO: 142 - RNA, 18 nt, Artificial Sequence
  Description of Artificial Sequence: Synthetic oligonucleotide
uuacugauauaauuuuca

SEQ ID NO: 143 - RNA, 18 nt, Artificial Sequence
  Description of Artificial Sequence: Synthetic oligonucleotide
gauauaauuuucaaaagg

SEQ ID NO: 144 - RNA, 18 nt, Artificial Sequence
  Description of Artificial Sequence: Synthetic oligonucleotide
aauuuucaaaagggaaua

SEQ ID NO: 145 - RNA, 18 nt, Artificial Sequence
  Description of Artificial Sequence: Synthetic oligonucleotide
cuuuggaguaaaaauaau

SEQ ID NO: 146 - RNA, 18 nt, Artificial Sequence
  Description of Artificial Sequence: Synthetic oligonucleotide
uuuggaguaaaaauaauu

SEQ ID NO: 147 - skipped

SEQ ID NO: 148 - RNA, 18 nt, Artificial Sequence
  Description of Artificial Sequence: Synthetic oligonucleotide
uuggaguaaaaauaauuu

SEQ ID NO: 149 - RNA, 18 nt, Artificial Sequence
  Description of Artificial Sequence: Synthetic oligonucleotide
uggaguaaaaauaauuua

SEQ ID NO: 150 - RNA, 18 nt, Artificial Sequence
  Description of Artificial Sequence: Synthetic oligonucleotide
gaguaaaaauaauuuaga

SEQ ID NO: 151 - RNA, 18 nt, Artificial Sequence
  Description of Artificial Sequence: Synthetic oligonucleotide
aguaaaaauaauuuagac

SEQ ID NO: 152 - RNA, 18 nt, Artificial Sequence
  Description of Artificial Sequence: Synthetic oligonucleotide
guaaaaauaauuuagacc

SEQ ID NO: 153 - RNA, 18 nt, Artificial Sequence
  Description of Artificial Sequence: Synthetic oligonucleotide
uaaaaauaauuuagaccu

SEQ ID NO: 154 - RNA, 18 nt, Artificial Sequence
  Description of Artificial Sequence: Synthetic oligonucleotide
uacugauauaauuuucaa

SEQ ID NO: 155 - RNA, 18 nt, Artificial Sequence
  Description of Artificial Sequence: Synthetic oligonucleotide
acugauauaauuuucaaa

SEQ ID NO: 156 - RNA, 18 nt, Artificial Sequence
  Description of Artificial Sequence: Synthetic oligonucleotide
cugauauaauuuucaaaa

SEQ ID NO: 157 - RNA, 18 nt, Artificial Sequence
  Description of Artificial Sequence: Synthetic oligonucleotide
ugauauaauuuucaaaag

SEQ ID NO: 158 - RNA, 18 nt, Artificial Sequence
  Description of Artificial Sequence: Synthetic oligonucleotide
auauaauuuucaaaaggg

SEQ ID NO: 159 - RNA, 18 nt, Artificial Sequence
  Description of Artificial Sequence: Synthetic oligonucleotide
uauaauuuucaaaaggga

SEQ ID NO: 160 - RNA, 18 nt, Artificial Sequence
  Description of Artificial Sequence: Synthetic oligonucleotide
auaauuuucaaaagggaa

SEQ ID NO: 161 - RNA, 18 nt, Artificial Sequence
  Description of Artificial Sequence: Synthetic oligonucleotide
uaauuuucaaaagggaau

SEQ ID NO: 162 - RNA, 18 nt, Artificial Sequence
  Description of Artificial Sequence: Synthetic oligonucleotide
caaggauuaaagguagca

SEQ ID NO: 163 - DNA, 18 bp, Artificial Sequence
  Description of Artificial Sequence: Synthetic oligonucleotide
cagagaaaatagtgttca

SEQ ID NO: 164 - DNA, 18 bp, Artificial Sequence
  Description of Artificial Sequence: Synthetic oligonucleotide
atattcagagaaaatagt

SEQ ID NO: 165 - DNA, 18 bp, Artificial Sequence
  Description of Artificial Sequence: Synthetic oligonucleotide
taaaaatattcagagaaa

SEQ ID NO: 166 - DNA, 18 bp, Artificial Sequence
  Description of Artificial Sequence: Synthetic oligonucleotide
aacaataaaaatattcag

SEQ ID NO: 167 - DNA, 18 bp, Artificial Sequence
  Description of Artificial Sequence: Synthetic oligonucleotide
ttccaaacaataaaaata

SEQ ID NO: 168 - DNA, 18 bp, Artificial Sequence
  Description of Artificial Sequence: Synthetic oligonucleotide
tattattccaaacaataa

SEQ ID NO: 169 - DNA, 18 bp, Artificial Sequence
  Description of Artificial Sequence: Synthetic oligonucleotide
tttgttattattccaaac

SEQ ID NO: 170 - DNA, 18 bp, Artificial Sequence
  Description of Artificial Sequence: Synthetic oligonucleotide
attattttgttattattc

SEQ ID NO: 171 - DNA, 18 bp, Artificial Sequence
  Description of Artificial Sequence: Synthetic oligonucleotide
atgtcattattttgttat

SEQ ID NO: 172 - DNA, 18 bp, Artificial Sequence
  Description of Artificial Sequence: Synthetic oligonucleotide
gatgtatgtcattatttt

SEQ ID NO: 173 - DNA, 18 bp, Artificial Sequence
  Description of Artificial Sequence: Synthetic oligonucleotide
taatagatgtatgtcatt

SEQ ID NO: 174 - DNA, 18 bp, Artificial Sequence
  Description of Artificial Sequence: Synthetic oligonucleotide
ctaaataatagatgtatg

SEQ ID NO: 175 - DNA, 18 bp, Artificial Sequence
  Description of Artificial Sequence: Synthetic oligonucleotide
aggaactaaataatagat

SEQ ID NO: 176 - DNA, 18 bp, Artificial Sequence
  Description of Artificial Sequence: Synthetic oligonucleotide
ttcttaggaactaaataa

SEQ ID NO: 177 - DNA, 18 bp, Artificial Sequence
  Description of Artificial Sequence: Synthetic oligonucleotide
actttttcttaggaacta

SEQ ID NO: 178 - DNA, 18 bp, Artificial Sequence
  Description of Artificial Sequence: Synthetic oligonucleotide
tatatactttttcttagg

SEQ ID NO: 179 - DNA, 18 bp, Artificial Sequence
  Description of Artificial Sequence: Synthetic oligonucleotide
tgcatgttttactttgga

SEQ ID NO: 180 - DNA, 18 bp, Artificial Sequence
  Description of Artificial Sequence: Synthetic oligonucleotide
gttttactttggagtaaa

SEQ ID NO: 181 - DNA, 18 bp, Artificial Sequence
  Description of Artificial Sequence: Synthetic oligonucleotide
actttggagtaaaaataa

SEQ ID NO: 182 - DNA, 18 bp, Artificial Sequence
  Description of Artificial Sequence: Synthetic oligonucleotide
ggagtaaaaataatttag

SEQ ID NO: 183 - DNA, 18 bp, Artificial Sequence
  Description of Artificial Sequence: Synthetic oligonucleotide
aaaaataatttagacctg

SEQ ID NO: 184 - DNA, 18 bp, Artificial Sequence
  Description of Artificial Sequence: Synthetic oligonucleotide
taatttagacctgatgtt

SEQ ID NO: 185 - DNA, 18 bp, Artificial Sequence
  Description of Artificial Sequence: Synthetic oligonucleotide
tagacctgatgtttaata

SEQ ID NO: 186 - DNA, 18 bp, Artificial Sequence
  Description of Artificial Sequence: Synthetic oligonucleotide
ctgatgtttaataaatat

SEQ ID NO: 187 - DNA, 18 bp, Artificial Sequence
  Description of Artificial Sequence: Synthetic oligonucleotide
gtttaataaatattctta

SEQ ID NO: 188 - DNA, 18 bp, Artificial Sequence
  Description of Artificial Sequence: Synthetic oligonucleotide
ataaatattcttactgat

SEQ ID NO: 189 - DNA, 18 bp, Artificial Sequence
  Description of Artificial Sequence: Synthetic oligonucleotide
tattcttactgatataat

SEQ ID NO: 190 - DNA, 18 bp, Artificial Sequence
  Description of Artificial Sequence: Synthetic oligonucleotide
ttactgatataattttca

SEQ ID NO: 191 - DNA, 18 bp, Artificial Sequence
  Description of Artificial Sequence: Synthetic oligonucleotide
gatataattttcaaaagg

SEQ ID NO: 192 - DNA, 18 bp, Artificial Sequence
  Description of Artificial Sequence: Synthetic oligonucleotide
aattttcaaaagggaata

SEQ ID NO: 193 - DNA, 18 bp, Artificial Sequence
  Description of Artificial Sequence: Synthetic oligonucleotide
ctttggagtaaaaataat

SEQ ID NO: 194 - DNA, 18 bp, Artificial Sequence
  Description of Artificial Sequence: Synthetic oligonucleotide
tttggagtaaaaataatt

SEQ ID NO: 195 - DNA, 18 bp, Artificial Sequence
  Description of Artificial Sequence: Synthetic oligonucleotide
ttggagtaaaaataattt

SEQ ID NO: 196 - DNA, 18 bp, Artificial Sequence
  Description of Artificial Sequence: Synthetic oligonucleotide
tggagtaaaaataattta

SEQ ID NO: 197 - DNA, 18 bp, Artificial Sequence
  Description of Artificial Sequence: Synthetic oligonucleotide
gagtaaaaataatttaga

SEQ ID NO: 198 - DNA, 18 bp, Artificial Sequence
  Description of Artificial Sequence: Synthetic oligonucleotide
agtaaaaataatttagac

SEQ ID NO: 199 - DNA, 18 bp, Artificial Sequence
  Description of Artificial Sequence: Synthetic oligonucleotide
gtaaaaataatttagacc

SEQ ID NO: 200 - DNA, 18 bp, Artificial Sequence
  Description of Artificial Sequence: Synthetic oligonucleotide
taaaaataatttagacct

SEQ ID NO: 201 - DNA, 18 bp, Artificial Sequence
  Description of Artificial Sequence: Synthetic oligonucleotide
tactgatataattttcaa

SEQ ID NO: 202 - DNA, 18 bp, Artificial Sequence
  Description of Artificial Sequence: Synthetic oligonucleotide
actgatataattttcaaa

SEQ ID NO: 203 - DNA, 18 bp, Artificial Sequence
  Description of Artificial Sequence: Synthetic oligonucleotide
ctgatataattttcaaaa

SEQ ID NO: 204 - DNA, 18 bp, Artificial Sequence
  Description of Artificial Sequence: Synthetic oligonucleotide
tgatataattttcaaaag

SEQ ID NO: 205 - DNA, 18 bp, Artificial Sequence
  Description of Artificial Sequence: Synthetic oligonucleotide
atataattttcaaaaggg

SEQ ID NO: 206 - DNA, 18 bp, Artificial Sequence
  Description of Artificial Sequence: Synthetic oligonucleotide
tataattttcaaaaggga

SEQ ID NO: 207 - DNA, 18 bp, Artificial Sequence
  Description of Artificial Sequence: Synthetic oligonucleotide
ataattttcaaaagggaa

SEQ ID NO: 208 - DNA, 18 bp, Artificial Sequence
  Description of Artificial Sequence: Synthetic oligonucleotide
taattttcaaaagggaat

SEQ ID NO: 209 - DNA, 18 bp, Artificial Sequence
  Description of Artificial Sequence: Synthetic oligonucleotide
caaggattaaaggtagca

SEQ ID NO: 210 - RNA, 18 nt, Artificial Sequence
  Description of Artificial Sequence: Synthetic oligonucleotide
gaugcucuccgucuguuu

SEQ ID NO: 211 - RNA, 18 nt, Artificial Sequence
  Description of Artificial Sequence: Synthetic oligonucleotide
uucaugaugcucuccguc

SEQ ID NO: 212 - RNA, 18 nt, Artificial Sequence
  Description of Artificial Sequence: Synthetic oligonucleotide
uuuuguucaugaugcucu

SEQ ID NO: 213 - RNA, 18 nt, Artificial Sequence
  Description of Artificial Sequence: Synthetic oligonucleotide
uuacuuuuuguucaugau

SEQ ID NO: 214 - RNA, 18 nt, Artificial Sequence
  Description of Artificial Sequence: Synthetic oligonucleotide
ugguguuacuuuuuguuc

SEQ ID NO: 215 - RNA, 18 nt, Artificial Sequence
  Description of Artificial Sequence: Synthetic oligonucleotide
acauuugguguuacuuuu

SEQ ID NO: 216 - RNA, 18 nt, Artificial Sequence
  Description of Artificial Sequence: Synthetic oligonucleotide
acagaacauuugguguua

SEQ ID NO: 217 - RNA, 18 nt, Artificial Sequence
  Description of Artificial Sequence: Synthetic oligonucleotide
auaugacagaacauuugg

SEQ ID NO: 218 - RNA, 18 nt, Artificial Sequence
  Description of Artificial Sequence: Synthetic oligonucleotide
aucugauaugacagaaca

SEQ ID NO: 219 - RNA, 18 nt, Artificial Sequence
  Description of Artificial Sequence: Synthetic oligonucleotide
uagaaaucugauaugaca

SEQ ID NO: 220 - RNA, 18 nt, Artificial Sequence
  Description of Artificial Sequence: Synthetic oligonucleotide
uuaguuagaaaucugaua

SEQ ID NO: 221 - RNA, 18 nt, Artificial Sequence
  Description of Artificial Sequence: Synthetic oligonucleotide
uguuauuaguuagaaauc

SEQ ID NO: 222 - RNA, 18 nt, Artificial Sequence
  Description of Artificial Sequence: Synthetic oligonucleotide
uaguuuguuauuaguuag

SEQ ID NO: 223 - RNA, 18 nt, Artificial Sequence
  Description of Artificial Sequence: Synthetic oligonucleotide
auauauaguuuguuauua

SEQ ID NO: 224 - RNA, 18 nt, Artificial Sequence
  Description of Artificial Sequence: Synthetic oligonucleotide
uagaaauauauaguuugu

SEQ ID NO: 225 - RNA, 18 nt, Artificial Sequence
  Description of Artificial Sequence: Synthetic oligonucleotide
caaaauagaaauauauag

SEQ ID NO: 226 - RNA, 18 nt, Artificial Sequence
  Description of Artificial Sequence: Synthetic oligonucleotide
auacaaaauagaaauaua

SEQ ID NO: 227 - RNA, 18 nt, Artificial Sequence
  Description of Artificial Sequence: Synthetic oligonucleotide
cuauacaaaauagaaaua

SEQ ID NO: 228 - RNA, 18 nt, Artificial Sequence
  Description of Artificial Sequence: Synthetic oligonucleotide
uccuauacaaaauagaaa

SEQ ID NO: 229 - RNA, 18 nt, Artificial Sequence
  Description of Artificial Sequence: Synthetic oligonucleotide
uauccuauacaaaauaga

SEQ ID NO: 230 - RNA, 18 nt, Artificial Sequence
  Description of Artificial Sequence: Synthetic oligonucleotide
auuauccuauacaaaaua

SEQ ID NO: 231 - RNA, 18 nt, Artificial Sequence
  Description of Artificial Sequence: Synthetic oligonucleotide
aguuggagcaagauuauc

SEQ ID NO: 232 - RNA, 18 nt, Artificial Sequence
  Description of Artificial Sequence: Synthetic oligonucleotide
auccaaguuggagcaaga

SEQ ID NO: 233 - RNA, 18 nt, Artificial Sequence
  Description of Artificial Sequence: Synthetic oligonucleotide
accccauccaaguuggag

SEQ ID NO: 234 - RNA, 18 nt, Artificial Sequence
  Description of Artificial Sequence: Synthetic oligonucleotide
gcuccaccccauccaagu

SEQ ID NO: 235 - RNA, 18 nt, Artificial Sequence
  Description of Artificial Sequence: Synthetic oligonucleotide
ccagcgcuccaccccauc

SEQ ID NO: 236 - RNA, 18 nt, Artificial Sequence
  Description of Artificial Sequence: Synthetic oligonucleotide
gaaccagcgcuccacccc

SEQ ID NO: 237 - RNA, 18 nt, Artificial Sequence
  Description of Artificial Sequence: Synthetic oligonucleotide
gggaggaaccagcgcucc

SEQ ID NO: 238 - RNA, 18 nt, Artificial Sequence
  Description of Artificial Sequence: Synthetic oligonucleotide
auaauaaagggcucaggg

SEQ ID NO: 239 - RNA, 18 nt, Artificial Sequence
  Description of Artificial Sequence: Synthetic oligonucleotide
ccauaauaaagggcucag

SEQ ID NO: 240 - RNA, 18 nt, Artificial Sequence
  Description of Artificial Sequence: Synthetic oligonucleotide
guaauacaguacccauaa

SEQ ID NO: 241 - RNA, 18 nt, Artificial Sequence
  Description of Artificial Sequence: Synthetic oligonucleotide
ggguaauacaguacccau

SEQ ID NO: 242 - RNA, 18 nt, Artificial Sequence
  Description of Artificial Sequence: Synthetic oligonucleotide
uuaaagguagcaaaaggg

SEQ ID NO: 243 - RNA, 18 nt, Artificial Sequence
  Description of Artificial Sequence: Synthetic oligonucleotide
aaggauuaaagguagcaa

SEQ ID NO: 244 - RNA, 18 nt, Artificial Sequence
  Description of Artificial Sequence: Synthetic oligonucleotide
agugcaaggauuaaaggu

SEQ ID NO: 245 - RNA, 18 nt, Artificial Sequence
  Description of Artificial Sequence: Synthetic oligonucleotide
gucacagugcaaggauua

SEQ ID NO: 246 - RNA, 18 nt, Artificial Sequence
  Description of Artificial Sequence: Synthetic oligonucleotide
cauaagucacagugcaag

SEQ ID NO: 247 - RNA, 18 nt, Artificial Sequence
  Description of Artificial Sequence: Synthetic oligonucleotide
cuacacauaagucacagu

SEQ ID NO: 248 - RNA, 18 nt, Artificial Sequence
  Description of Artificial Sequence: Synthetic oligonucleotide
ccccacuacacauaaguc

SEQ ID NO: 249 - RNA, 18 nt, Artificial Sequence
  Description of Artificial Sequence: Synthetic oligonucleotide
ccucaccccacuacacau

SEQ ID NO: 250 - RNA, 18 nt, Artificial Sequence
  Description of Artificial Sequence: Synthetic oligonucleotide
cccucccucaccccacua

SEQ ID NO: 251 - RNA, 18 nt, Artificial Sequence
  Description of Artificial Sequence: Synthetic oligonucleotide
ccaaucccucccucaccc

SEQ ID NO: 252 - RNA, 18 nt, Artificial Sequence
  Description of Artificial Sequence: Synthetic oligonucleotide
ccuucccaaucccucccu

SEQ ID NO: 253 - RNA, 18 nt, Artificial Sequence
  Description of Artificial Sequence: Synthetic oligonucleotide
aguacccuucccaauccc

SEQ ID NO: 254 - RNA, 18 nt, Artificial Sequence
  Description of Artificial Sequence: Synthetic oligonucleotide
auaauaguacccuuccca

SEQ ID NO: 255 - RNA, 18 nt, Artificial Sequence
  Description of Artificial Sequence: Synthetic oligonucleotide
gugcaauaauaguacccu

SEQ ID NO: 256 - RNA, 18 nt, Artificial Sequence
  Description of Artificial Sequence: Synthetic oligonucleotide
cuguggugcaauaauagu

SEQ ID NO: 257 - RNA, 18 nt, Artificial Sequence
  Description of Artificial Sequence: Synthetic oligonucleotide
gaugcucacugccuguuu

SEQ ID NO: 258 - RNA, 18 nt, Artificial Sequence
  Description of Artificial Sequence: Synthetic oligonucleotide
uauaugaugcucacugcc

SEQ ID NO: 259 - RNA, 18 nt, Artificial Sequence
  Description of Artificial Sequence: Synthetic oligonucleotide
uuuuguauaugaugcuca

SEQ ID NO: 260 - RNA, 18 nt, Artificial Sequence
  Description of Artificial Sequence: Synthetic oligonucleotide
uuacuuuuuguauaugau

SEQ ID NO: 261 - RNA, 18 nt, Artificial Sequence
  Description of Artificial Sequence: Synthetic oligonucleotide
ugguguuacuuuuuguau

SEQ ID NO: 262 - RNA, 18 nt, Artificial Sequence
  Description of Artificial Sequence: Synthetic oligonucleotide
acauuugguguuacuuuu

SEQ ID NO: 263 - RNA, 18 nt, Artificial Sequence
  Description of Artificial Sequence: Synthetic oligonucleotide
acagaacauuugguguua

SEQ ID NO: 264 - RNA, 18 nt, Artificial Sequence
  Description of Artificial Sequence: Synthetic oligonucleotide
auaugacagaacauuugg

SEQ ID NO: 265 - RNA, 18 nt, Artificial Sequence
  Description of Artificial Sequence: Synthetic oligonucleotide
agcugauaugacagaaca

SEQ ID NO: 266 - RNA, 18 nt, Artificial Sequence
  Description of Artificial Sequence: Synthetic oligonucleotide
uagaaagcugauaugaca

SEQ ID NO: 267 - RNA, 18 nt, Artificial Sequence
  Description of Artificial Sequence: Synthetic oligonucleotide
uuaguuagaaagcugaua

SEQ ID NO: 268 - RNA, 18 nt, Artificial Sequence
  Description of Artificial Sequence: Synthetic oligonucleotide
uauuauuaguuagaaagc

SEQ ID NO: 269 - RNA, 18 nt, Artificial Sequence
  Description of Artificial Sequence: Synthetic oligonucleotide
uaguuuauuauuaguuag

SEQ ID NO: 270 - RNA, 18 nt, Artificial Sequence
  Description of Artificial Sequence: Synthetic oligonucleotide
auauauaguuuauuauua

SEQ ID NO: 271 - RNA, 18 nt, Artificial Sequence
  Description of Artificial Sequence: Synthetic oligonucleotide
uagaaauauauaguuuau

SEQ ID NO: 272 - RNA, 18 nt, Artificial Sequence
  Description of Artificial Sequence: Synthetic oligonucleotide
uaaaauagaaauauauag

SEQ ID NO: 273 - RNA, 18 nt, Artificial Sequence
  Description of Artificial Sequence: Synthetic oligonucleotide
auauaaaauagaaauaua

SEQ ID NO: 274 - RNA, 18 nt, Artificial Sequence
  Description of Artificial Sequence: Synthetic oligonucleotide
cuauauaaaauagaaaua

SEQ ID NO: 275 - RNA, 18 nt, Artificial Sequence
  Description of Artificial Sequence: Synthetic oligonucleotide
uccuauauaaaauagaaa

SEQ ID NO: 276 - RNA, 18 nt, Artificial Sequence
  Description of Artificial Sequence: Synthetic oligonucleotide
uauccuauauaaaauaga

SEQ ID NO: 277 - RNA, 18 nt, Artificial Sequence
  Description of Artificial Sequence: Synthetic oligonucleotide
auuauccuauauaaaaua

SEQ ID NO: 278 - RNA, 18 nt, Artificial Sequence
  Description of Artificial Sequence: Synthetic oligonucleotide
aguuggagcaagauuauc

SEQ ID NO: 279 - RNA, 18 nt, Artificial Sequence
  Description of Artificial Sequence: Synthetic oligonucleotide
auccaaguuggagcaaga

SEQ ID NO: 280 - RNA, 18 nt, Artificial Sequence
  Description of Artificial Sequence: Synthetic oligonucleotide
accccauccaaguuggag

SEQ ID NO: 281 - RNA, 18 nt, Artificial Sequence
  Description of Artificial Sequence: Synthetic oligonucleotide
gcuccaccccauccaagu

SEQ ID NO: 282 - RNA, 18 nt, Artificial Sequence
  Description of Artificial Sequence: Synthetic oligonucleotide
ccaccgcuccaccccauc

SEQ ID NO: 283 - RNA, 18 nt, Artificial Sequence
  Description of Artificial Sequence: Synthetic oligonucleotide
gaaccaccgcuccacccc

SEQ ID NO: 284 - RNA, 18 nt, Artificial Sequence
  Description of Artificial Sequence: Synthetic oligonucleotide
gggaggaaccaccgcucc

SEQ ID NO: 285 - RNA, 18 nt, Artificial Sequence
  Description of Artificial Sequence: Synthetic oligonucleotide
auaauaaagggcugaggg

SEQ ID NO: 286 - RNA, 18 nt, Artificial Sequence
  Description of Artificial Sequence: Synthetic oligonucleotide
ccauaauaaagggcugag

SEQ ID NO: 287 - RNA, 18 nt, Artificial Sequence
  Description of Artificial Sequence: Synthetic oligonucleotide
guaauacaguacccauaa

SEQ ID NO: 288 - RNA, 18 nt, Artificial Sequence
  Description of Artificial Sequence: Synthetic oligonucleotide
ggguaauacaguacccau

SEQ ID NO: 289 - RNA, 18 nt, Artificial Sequence
  Description of Artificial Sequence: Synthetic oligonucleotide
uuaaagguagcaaaaggg

SEQ ID NO: 290 - RNA, 18 nt, Artificial Sequence
  Description of Artificial Sequence: Synthetic oligonucleotide
aaggauuaaagguagcaa

SEQ ID NO: 291 - RNA, 18 nt, Artificial Sequence
  Description of Artificial Sequence: Synthetic oligonucleotide
agugcaaggauuaaaggu

SEQ ID NO: 292 - RNA, 18 nt, Artificial Sequence
  Description of Artificial Sequence: Synthetic oligonucleotide
gucacagugcaaggauua

SEQ ID NO: 293 - RNA, 18 nt, Artificial Sequence
  Description of Artificial Sequence: Synthetic oligonucleotide
cauaagucacagugcaag

SEQ ID NO: 294 - RNA, 18 nt, Artificial Sequence
  Description of Artificial Sequence: Synthetic oligonucleotide
cuacacauaagucacagu

SEQ ID NO: 295 - RNA, 18 nt, Artificial Sequence
  Description of Artificial Sequence: Synthetic oligonucleotide
ucccacuacacauaaguc

SEQ ID NO: 296 - RNA, 18 nt, Artificial Sequence
  Description of Artificial Sequence: Synthetic oligonucleotide
cucaaucccacuacacau

SEQ ID NO: 297 - RNA, 18 nt, Artificial Sequence
  Description of Artificial Sequence: Synthetic oligonucleotide
ccucccucaaucccacua

SEQ ID NO: 298 - RNA, 18 nt, Artificial Sequence
  Description of Artificial Sequence: Synthetic oligonucleotide
cacucccucccucaaucc

SEQ ID NO: 299 - RNA, 18 nt, Artificial Sequence
  Description of Artificial Sequence: Synthetic oligonucleotide
cuucccacucccucccuc

SEQ ID NO: 300 - RNA, 18 nt, Artificial Sequence
  Description of Artificial Sequence: Synthetic oligonucleotide
guacccuucccacucccu

SEQ ID NO: 301 - RNA, 18 nt, Artificial Sequence
  Description of Artificial Sequence: Synthetic oligonucleotide
caauuguacccuucccac

SEQ ID NO: 302 - RNA, 18 nt, Artificial Sequence
  Description of Artificial Sequence: Synthetic oligonucleotide
uggugcaauuguacccuu

SEQ ID NO: 303 - RNA, 18 nt, Artificial Sequence
  Description of Artificial Sequence: Synthetic oligonucleotide
uacuguggugcaauugua

SEQ ID NO: 304 - DNA, 16 bp, Artificial Sequence
  Description of Artificial Sequence: Synthetic oligonucleotide
ttggagcaagattatc

SEQ ID NO: 305 - DNA, 17 bp, Artificial Sequence
  Description of Artificial Sequence: Synthetic oligonucleotide
gttggagcaagattatc

SEQ ID NO: 306 - DNA, 16 bp, Artificial Sequence
  Description of Artificial Sequence: Synthetic oligonucleotide
gttggagcaagattat

SEQ ID NO: 307 - DNA, 17 bp, Artificial Sequence
  Description of Artificial Sequence: Synthetic oligonucleotide
agttggagcaagattat

SEQ ID NO: 308 - DNA, 16 bp, Artificial Sequence
  Description of Artificial Sequence: Synthetic oligonucleotide
agttggagcaagatta

SEQ ID NO: 309 - DNA, 18 bp, Artificial Sequence
  Description of Artificial Sequence: Synthetic oligonucleotide
gattatcctatacaaaat

SEQ ID NO: 310 - DNA, 18 bp, Artificial Sequence
  Description of Artificial Sequence: Synthetic oligonucleotide
agattatcctatacaaaa

SEQ ID NO: 311 - DNA, 18 bp, Artificial Sequence
  Description of Artificial Sequence: Synthetic oligonucleotide
aagattatcctatacaaa

SEQ ID NO: 312 - DNA, 18 bp, Artificial Sequence
  Description of Artificial Sequence: Synthetic oligonucleotide
caagattatcctatacaa

SEQ ID NO: 313 - DNA, 18 bp, Artificial Sequence
  Description of Artificial Sequence: Synthetic oligonucleotide
gcaagattatcctataca

SEQ ID NO: 314 - DNA, 18 bp, Artificial Sequence
  Description of Artificial Sequence: Synthetic oligonucleotide
agcaagattatcctatac

SEQ ID NO: 315 - DNA, 18 bp, Artificial Sequence
  Description of Artificial Sequence: Synthetic oligonucleotide
gagcaagattatcctata

SEQ ID NO: 316 - DNA, 18 bp, Artificial Sequence
  Description of Artificial Sequence: Synthetic oligonucleotide
ggagcaagattatcctat

SEQ ID NO: 317 - DNA, 18 bp, Artificial Sequence
  Description of Artificial Sequence: Synthetic oligonucleotide
tggagcaagattatccta

SEQ ID NO: 318 - DNA, 18 bp, Artificial Sequence
  Description of Artificial Sequence: Synthetic oligonucleotide
gttggagcaagattatcc

SEQ ID NO: 319 - DNA, 18 bp, Artificial Sequence
  Description of Artificial Sequence: Synthetic oligonucleotide
ttggagcaagattatcct

SEQ ID NO: 320 - DNA, 18 bp, Artificial Sequence
  Description of Artificial Sequence: Synthetic oligonucleotide
aagttggagcaagattat

SEQ ID NO: 321 - DNA, 18 bp, Artificial Sequence
  Description of Artificial Sequence: Synthetic oligonucleotide
caagttggagcaagatta

SEQ ID NO: 322 - DNA, 18 bp, Artificial Sequence
  Description of Artificial Sequence: Synthetic oligonucleotide
ccaagttggagcaagatt

SEQ ID NO: 323 - DNA, 18 bp, Artificial Sequence
  Description of Artificial Sequence: Synthetic oligonucleotide
tccaagttggagcaagat

SEQ ID NO: 324 - DNA, 18 bp, Artificial Sequence
  Description of Artificial Sequence: Synthetic oligonucleotide
agtacccataataaaggg

SEQ ID NO: 325 - DNA, 18 bp, Artificial Sequence
  Description of Artificial Sequence: Synthetic oligonucleotide
aatacagtacccataata

SEQ ID NO: 326 - DNA, 18 bp, Artificial Sequence
  Description of Artificial Sequence: Synthetic oligonucleotide
attaaaggtagcaaaagg

SEQ ID NO: 327 - DNA, 18 bp, Artificial Sequence
  Description of Artificial Sequence: Synthetic oligonucleotide
gattaaaggtagcaaaag

SEQ ID NO: 328 - DNA, 18 bp, Artificial Sequence
  Description of Artificial Sequence: Synthetic oligonucleotide
ggattaaaggtagcaaaa

SEQ ID NO: 329 - DNA, 18 bp, Artificial Sequence
  Description of Artificial Sequence: Synthetic oligonucleotide
aggattaaaggtagcaaa

SEQ ID NO: 330 - DNA, 18 bp, Artificial Sequence
  Description of Artificial Sequence: Synthetic oligonucleotide
caaggattaaaggtagca

SEQ ID NO: 331 - DNA, 18 bp, Artificial Sequence
  Description of Artificial Sequence: Synthetic oligonucleotide
gcaaggattaaaggtagc

SEQ ID NO: 332 - DNA, 18 bp, Artificial Sequence
  Description of Artificial Sequence: Synthetic oligonucleotide
tgcaaggattaaaggtag

SEQ ID NO: 333 - DNA, 18 bp, Artificial Sequence
  Description of Artificial Sequence: Synthetic oligonucleotide
gtgcaaggattaaaggta

SEQ ID NO: 334 - DNA, 18 bp, Artificial Sequence
  Description of Artificial Sequence: Synthetic oligonucleotide
agtcacagtgcaaggatt

SEQ ID NO: 335 - DNA, 18 bp, Artificial Sequence
  Description of Artificial Sequence: Synthetic oligonucleotide
aagtcacagtgcaaggat

SEQ ID NO: 336 - DNA, 18 bp, Artificial Sequence
  Description of Artificial Sequence: Synthetic oligonucleotide
taagtcacagtgcaagga

SEQ ID NO: 337 - DNA, 18 bp, Artificial Sequence
  Description of Artificial Sequence: Synthetic oligonucleotide
ataagtcacagtgcaagg

SEQ ID NO: 338 - DNA, 18 bp, Artificial Sequence
  Description of Artificial Sequence: Synthetic oligonucleotide
acataagtcacagtgcaa

SEQ ID NO: 339 - DNA, 18 bp, Artificial Sequence
  Description of Artificial Sequence: Synthetic oligonucleotide
cacataagtcacagtgca

SEQ ID NO: 340 - DNA, 18 bp, Artificial Sequence
  Description of Artificial Sequence: Synthetic oligonucleotide
acacataagtcacagtgc

SEQ ID NO: 341 - DNA, 18 bp, Artificial Sequence
  Description of Artificial Sequence: Synthetic oligonucleotide
tacacataagtcacagtg

SEQ ID NO: 342 - RNA, 16 nt, Artificial Sequence
  Description of Artificial Sequence: Synthetic oligonucleotide
uuggagcaagauuauc

SEQ ID NO: 343 - RNA, 17 nt, Artificial Sequence
  Description of Artificial Sequence: Synthetic oligonucleotide
guuggagcaagauuauc

SEQ ID NO: 344 - RNA, 16 nt, Artificial Sequence
  Description of Artificial Sequence: Synthetic oligonucleotide
guuggagcaagauuau

SEQ ID NO: 345 - RNA, 17 nt, Artificial Sequence
  Description of Artificial Sequence: Synthetic oligonucleotide
aguuggagcaagauuau

SEQ ID NO: 346 - RNA, 16 nt, Artificial Sequence
  Description of Artificial Sequence: Synthetic oligonucleotide
aguuggagcaagauua

SEQ ID NO: 347 - RNA, 18 nt, Artificial Sequence
  Description of Artificial Sequence: Synthetic oligonucleotide
gauuauccuauacaaaau

SEQ ID NO: 348 - RNA, 18 nt, Artificial Sequence
  Description of Artificial Sequence: Synthetic oligonucleotide
agauuauccuauacaaaa

SEQ ID NO: 349 - RNA, 18 nt, Artificial Sequence
  Description of Artificial Sequence: Synthetic oligonucleotide
aagauuauccuauacaaa

SEQ ID NO: 350 - RNA, 18 nt, Artificial Sequence
  Description of Artificial Sequence: Synthetic oligonucleotide
caagauuauccuauacaa

SEQ ID NO: 351 - RNA, 18 nt, Artificial Sequence
  Description of Artificial Sequence: Synthetic oligonucleotide
gcaagauuauccuauaca

SEQ ID NO: 352 - RNA, 18 nt, Artificial Sequence
  Description of Artificial Sequence: Synthetic oligonucleotide
agcaagauuauccuauac

SEQ ID NO: 353 - RNA, 18 nt, Artificial Sequence
  Description of Artificial Sequence: Synthetic oligonucleotide
gagcaagauuauccuaua

SEQ ID NO: 354 - RNA, 18 nt, Artificial Sequence
  Description of Artificial Sequence: Synthetic oligonucleotide
ggagcaagauuauccuau

SEQ ID NO: 355 - RNA, 18 nt, Artificial Sequence
  Description of Artificial Sequence: Synthetic oligonucleotide
uggagcaagauuauccua

SEQ ID NO: 356 - RNA, 18 nt, Artificial Sequence
  Description of Artificial Sequence: Synthetic oligonucleotide
guuggagcaagauuaucc

SEQ ID NO: 357 - RNA, 18 nt, Artificial Sequence
  Description of Artificial Sequence: Synthetic oligonucleotide
uuggagcaagauuauccu

SEQ ID NO: 358 - RNA, 18 nt, Artificial Sequence
  Description of Artificial Sequence: Synthetic oligonucleotide
aaguuggagcaagauuau

SEQ ID NO: 359 - RNA, 18 nt, Artificial Sequence
  Description of Artificial Sequence: Synthetic oligonucleotide
caaguuggagcaagauua

SEQ ID NO: 360 - RNA, 18 nt, Artificial Sequence
  Description of Artificial Sequence: Synthetic oligonucleotide
ccaaguuggagcaagauu

SEQ ID NO: 361 - RNA, 18 nt, Artificial Sequence
  Description of Artificial Sequence: Synthetic oligonucleotide
uccaaguuggagcaagau

SEQ ID NO: 362 - RNA, 18 nt, Artificial Sequence
  Description of Artificial Sequence: Synthetic oligonucleotide
aguacccauaauaaaggg

SEQ ID NO: 363 - RNA, 18 nt, Artificial Sequence
  Description of Artificial Sequence: Synthetic oligonucleotide
aauacaguacccauaaua

SEQ ID NO: 364 - RNA, 18 nt, Artificial Sequence
  Description of Artificial Sequence: Synthetic oligonucleotide
auuaaagguagcaaaagg

SEQ ID NO: 365 - RNA, 18 nt, Artificial Sequence
  Description of Artificial Sequence: Synthetic oligonucleotide
gauuaaagguagcaaaag

SEQ ID NO: 366 - RNA, 18 nt, Artificial Sequence
  Description of Artificial Sequence: Synthetic oligonucleotide
ggauuaaagguagcaaaa

SEQ ID NO: 367 - RNA, 18 nt, Artificial Sequence
  Description of Artificial Sequence: Synthetic oligonucleotide
aggauuaaagguagcaaa

SEQ ID NO: 368 - RNA, 18 nt, Artificial Sequence
  Description of Artificial Sequence: Synthetic oligonucleotide
caaggauuaaagguagca

SEQ ID NO: 369 - RNA, 18 nt, Artificial Sequence
  Description of Artificial Sequence: Synthetic oligonucleotide
gcaaggauuaaagguagc

SEQ ID NO: 370 - RNA, 18 nt, Artificial Sequence
  Description of Artificial Sequence: Synthetic oligonucleotide
ugcaaggauuaaagguag

SEQ ID NO: 371 - RNA, 18 nt, Artificial Sequence
  Description of Artificial Sequence: Synthetic oligonucleotide
gugcaaggauuaaaggua

SEQ ID NO: 372 - RNA, 18 nt, Artificial Sequence
  Description of Artificial Sequence: Synthetic oligonucleotide
agucacagugcaaggauu

SEQ ID NO: 373 - RNA, 18 nt, Artificial Sequence
  Description of Artificial Sequence: Synthetic oligonucleotide
aagucacagugcaaggau

SEQ ID NO: 374 - RNA, 18 nt, Artificial Sequence
  Description of Artificial Sequence: Synthetic oligonucleotide
uaagucacagugcaagga

SEQ ID NO: 375 - RNA, 18 nt, Artificial Sequence
  Description of Artificial Sequence: Synthetic oligonucleotide
auaagucacagugcaagg

SEQ ID NO: 376 - RNA, 18 nt, Artificial Sequence
  Description of Artificial Sequence: Synthetic oligonucleotide
acauaagucacagugcaa

SEQ ID NO: 377 - RNA, 18 nt, Artificial Sequence
  Description of Artificial Sequence: Synthetic oligonucleotide
cacauaagucacagugca

SEQ ID NO: 378 - RNA, 18 nt, Artificial Sequence
  Description of Artificial Sequence: Synthetic oligonucleotide
acacauaagucacagugc

SEQ ID NO: 379 - RNA, 18 nt, Artificial Sequence
  Description of Artificial Sequence: Synthetic oligonucleotide
uacacauaagucacagug

SEQ ID NO: 380 - DNA, 18 bp, Artificial Sequence
  Description of Artificial Sequence: Synthetic oligonucleotide
atgaatttaataaacttt

SEQ ID NO: 381 - DNA, 18 bp, Artificial Sequence
  Description of Artificial Sequence: Synthetic oligonucleotide
gaccaatgaatttaataa

SEQ ID NO: 382 - DNA, 18 bp, Artificial Sequence
  Description of Artificial Sequence: Synthetic oligonucleotide
cacttgaccaatgaattt

SEQ ID NO: 383 - DNA, 18 bp, Artificial Sequence
  Description of Artificial Sequence: Synthetic oligonucleotide
ctgagcacttgaccaatg

SEQ ID NO: 384 - DNA, 18 bp, Artificial Sequence
  Description of Artificial Sequence: Synthetic oligonucleotide
aatatctgagcacttgac

SEQ ID NO: 385 - DNA, 18 bp, Artificial Sequence
  Description of Artificial Sequence: Synthetic oligonucleotide
atggaaatatctgagcac

SEQ ID NO: 386 - DNA, 18 bp, Artificial Sequence
  Description of Artificial Sequence: Synthetic oligonucleotide
aatgtatggaaatatctg

SEQ ID NO: 387 - DNA, 18 bp, Artificial Sequence
  Description of Artificial Sequence: Synthetic oligonucleotide
agtgtaatgtatggaaat

SEQ ID NO: 388 - DNA, 18 bp, Artificial Sequence
  Description of Artificial Sequence: Synthetic oligonucleotide
aatgaagtgtaatgtatg

SEQ ID NO: 389 - DNA, 18 bp, Artificial Sequence
  Description of Artificial Sequence: Synthetic oligonucleotide
atagaaatgaagtgtaat

SEQ ID NO: 390 - DNA, 18 bp, Artificial Sequence
  Description of Artificial Sequence: Synthetic oligonucleotide
tttttatagaaatgaagt

SEQ ID NO: 391 - DNA, 18 bp, Artificial Sequence
  Description of Artificial Sequence: Synthetic oligonucleotide
cagcttttttatagaaat

SEQ ID NO: 392 - DNA, 18 bp, Artificial Sequence
  Description of Artificial Sequence: Synthetic oligonucleotide
aagatcagcttttttata

SEQ ID NO: 393 - DNA, 18 bp, Artificial Sequence
  Description of Artificial Sequence: Synthetic oligonucleotide
ccgataagatcagctttt

SEQ ID NO: 394 - DNA, 18 bp, Artificial Sequence
  Description of Artificial Sequence: Synthetic oligonucleotide
gtataccgataagatcag

SEQ ID NO: 395 - DNA, 18 bp, Artificial Sequence
  Description of Artificial Sequence: Synthetic oligonucleotide
taaaagtataccgataag

SEQ ID NO: 396 - DNA, 18 bp, Artificial Sequence
  Description of Artificial Sequence: Synthetic oligonucleotide
aaaattaaaagtataccg

SEQ ID NO: 397 - DNA, 18 bp, Artificial Sequence
  Description of Artificial Sequence: Synthetic oligonucleotide
ctgagaaaattaaaagta

SEQ ID NO: 398 - DNA, 18 bp, Artificial Sequence
  Description of Artificial Sequence: Synthetic oligonucleotide
tatttctgagaaaattaa

SEQ ID NO: 399 - DNA, 18 bp, Artificial Sequence
  Description of Artificial Sequence: Synthetic oligonucleotide
atggttatttctgagaaa

SEQ ID NO: 400 - DNA, 18 bp, Artificial Sequence
  Description of Artificial Sequence: Synthetic oligonucleotide
tagatatggttatttctg

SEQ ID NO: 401 - DNA, 18 bp, Artificial Sequence
  Description of Artificial Sequence: Synthetic oligonucleotide
aattatagatatggttat

SEQ ID NO: 402 - DNA, 18 bp, Artificial Sequence
  Description of Artificial Sequence: Synthetic oligonucleotide
ttaataattatagatatg

SEQ ID NO: 403 - DNA, 18 bp, Artificial Sequence
  Description of Artificial Sequence: Synthetic oligonucleotide
attgattaataattatag

SEQ ID NO: 404 - DNA, 18 bp, Artificial Sequence
  Description of Artificial Sequence: Synthetic oligonucleotide
gcattattgattaataat

SEQ ID NO: 405 - DNA, 18 bp, Artificial Sequence
  Description of Artificial Sequence: Synthetic oligonucleotide
aaaaggcattattgatta

SEQ ID NO: 406 - DNA, 18 bp, Artificial Sequence
  Description of Artificial Sequence: Synthetic oligonucleotide
aatataaaaggcattatt

SEQ ID NO: 407 - DNA, 18 bp, Artificial Sequence
  Description of Artificial Sequence: Synthetic oligonucleotide
cttttaatataaaaggca

SEQ ID NO: 408 - DNA, 18 bp, Artificial Sequence
  Description of Artificial Sequence: Synthetic oligonucleotide
aacctcttttaatataaa

SEQ ID NO: 409 - DNA, 18 bp, Artificial Sequence
  Description of Artificial Sequence: Synthetic oligonucleotide
aaactaacctcttttaat

SEQ ID NO: 410 - DNA, 18 bp, Artificial Sequence
  Description of Artificial Sequence: Synthetic oligonucleotide
ttcaaaaactaacctctt

SEQ ID NO: 411 - DNA, 18 bp, Artificial Sequence
  Description of Artificial Sequence: Synthetic oligonucleotide
caagtttcaaaaactaac

SEQ ID NO: 412 - DNA, 18 bp, Artificial Sequence
  Description of Artificial Sequence: Synthetic oligonucleotide
aactccaagtttcaaaaa

SEQ ID NO: 413 - DNA, 18 bp, Artificial Sequence
  Description of Artificial Sequence: Synthetic oligonucleotide
tctaaaactccaagtttc

SEQ ID NO: 414 - DNA, 18 bp, Artificial Sequence
  Description of Artificial Sequence: Synthetic oligonucleotide
ttatgtctaaaactccaa

SEQ ID NO: 415 - DNA, 18 bp, Artificial Sequence
  Description of Artificial Sequence: Synthetic oligonucleotide
ggattttatgtctaaaac

SEQ ID NO: 416 - DNA, 18 bp, Artificial Sequence
  Description of Artificial Sequence: Synthetic oligonucleotide
tataaggattttatgtct

SEQ ID NO: 417 - DNA, 18 bp, Artificial Sequence
  Description of Artificial Sequence: Synthetic oligonucleotide
gcatttataaggatttta

SEQ ID NO: 418 - DNA, 18 bp, Artificial Sequence
  Description of Artificial Sequence: Synthetic oligonucleotide
tatcagcatttataagga

SEQ ID NO: 419 - DNA, 18 bp, Artificial Sequence
  Description of Artificial Sequence: Synthetic oligonucleotide
atcactatcagcatttat

SEQ ID NO: 420 - DNA, 18 bp, Artificial Sequence
  Description of Artificial Sequence: Synthetic oligonucleotide
gttatatcactatcagca

SEQ ID NO: 421 - DNA, 18 bp, Artificial Sequence
  Description of Artificial Sequence: Synthetic oligonucleotide
tattagttatatcactat

SEQ ID NO: 422 - DNA, 18 bp, Artificial Sequence
  Description of Artificial Sequence: Synthetic oligonucleotide
taaactattagttatatc

SEQ ID NO: 423 - DNA, 18 bp, Artificial Sequence
  Description of Artificial Sequence: Synthetic oligonucleotide
ccatttaaactattagtt

SEQ ID NO: 424 - DNA, 18 bp, Artificial Sequence
  Description of Artificial Sequence: Synthetic oligonucleotide
tctgaccatttaaactat

SEQ ID NO: 425 - DNA, 18 bp, Artificial Sequence
  Description of Artificial Sequence: Synthetic oligonucleotide
ataaatctgaccatttaa

SEQ ID NO: 426 - DNA, 18 bp, Artificial Sequence
  Description of Artificial Sequence: Synthetic oligonucleotide
tattcataaatctgacca

SEQ ID NO: 427 - DNA, 18 bp, Artificial Sequence
  Description of Artificial Sequence: Synthetic oligonucleotide
agccatattcataaatct

SEQ ID NO: 428 - DNA, 18 bp, Artificial Sequence
  Description of Artificial Sequence: Synthetic oligonucleotide
aatagagccatattcata

SEQ ID NO: 429 - DNA, 18 bp, Artificial Sequence
  Description of Artificial Sequence: Synthetic oligonucleotide
tgaggaatagagccatat

SEQ ID NO: 430 - DNA, 18 bp, Artificial Sequence
  Description of Artificial Sequence: Synthetic oligonucleotide
cattatgaggaatagagc

SEQ ID NO: 431 - DNA, 18 bp, Artificial Sequence
  Description of Artificial Sequence: Synthetic oligonucleotide
gttgtcattatgaggaat

SEQ ID NO: 432 - DNA, 18 bp, Artificial Sequence
  Description of Artificial Sequence: Synthetic oligonucleotide
tgtatgttgtcattatga

SEQ ID NO: 433 - DNA, 18 bp, Artificial Sequence
  Description of Artificial Sequence: Synthetic oligonucleotide
ctgtgtgtatgttgtcat

SEQ ID NO: 434 - DNA, 18 bp, Artificial Sequence
  Description of Artificial Sequence: Synthetic oligonucleotide
tagtgctgtgtgtatgtt

SEQ ID NO: 435 - DNA, 18 bp, Artificial Sequence
  Description of Artificial Sequence: Synthetic oligonucleotide
cattttagtgctgtgtgt

SEQ ID NO: 436 - DNA, 18 bp, Artificial Sequence
  Description of Artificial Sequence: Synthetic oligonucleotide
ttagtcattttagtgctg

SEQ ID NO: 437 - DNA, 18 bp, Artificial Sequence
  Description of Artificial Sequence: Synthetic oligonucleotide
agagattagtcattttag

SEQ ID NO: 438 - DNA, 18 bp, Artificial Sequence
  Description of Artificial Sequence: Synthetic oligonucleotide
attgaagagattagtcat

SEQ ID NO: 439 - DNA, 18 bp, Artificial Sequence
  Description of Artificial Sequence: Synthetic oligonucleotide
cacgtattgaagagatta

SEQ ID NO: 440 - DNA, 18 bp, Artificial Sequence
  Description of Artificial Sequence: Synthetic oligonucleotide
ccaaacacgtattgaaga

SEQ ID NO: 441 - DNA, 18 bp, Artificial Sequence
  Description of Artificial Sequence: Synthetic oligonucleotide
caatgccaaacacgtatt

SEQ ID NO: 442 - DNA, 18 bp, Artificial Sequence
  Description of Artificial Sequence: Synthetic oligonucleotide
ctctacaatgccaaacac

SEQ ID NO: 443 - DNA, 18 bp, Artificial Sequence
  Description of Artificial Sequence: Synthetic oligonucleotide
tttgactctacaatgcca

SEQ ID NO: 444 - DNA, 18 bp, Artificial Sequence
  Description of Artificial Sequence: Synthetic oligonucleotide
gttattttgactctacaa

SEQ ID NO: 445 - DNA, 18 bp, Artificial Sequence
  Description of Artificial Sequence: Synthetic oligonucleotide
ataacgttattttgactc

SEQ ID NO: 446 - DNA, 18 bp, Artificial Sequence
  Description of Artificial Sequence: Synthetic oligonucleotide
caattataacgttatttt

SEQ ID NO: 447 - DNA, 18 bp, Artificial Sequence
  Description of Artificial Sequence: Synthetic oligonucleotide
agaatcaattataacgtt

SEQ ID NO: 448 - DNA, 18 bp, Artificial Sequence
  Description of Artificial Sequence: Synthetic oligonucleotide
aaaatagaatcaattata

SEQ ID NO: 449 - DNA, 18 bp, Artificial Sequence
  Description of Artificial Sequence: Synthetic oligonucleotide
tataaaaaatagaatcaa

SEQ ID NO: 450 - DNA, 18 bp, Artificial Sequence
  Description of Artificial Sequence: Synthetic oligonucleotide
agaagtataaaaaataga

SEQ ID NO: 451 - DNA, 18 bp, Artificial Sequence
  Description of Artificial Sequence: Synthetic oligonucleotide
acactagaagtataaaaa

SEQ ID NO: 452 - DNA, 18 bp, Artificial Sequence
  Description of Artificial Sequence: Synthetic oligonucleotide
tccaaacactagaagtat

SEQ ID NO: 453 - DNA, 18 bp, Artificial Sequence
  Description of Artificial Sequence: Synthetic oligonucleotide
aaatatccaaacactaga

SEQ ID NO: 454 - DNA, 18 bp, Artificial Sequence
  Description of Artificial Sequence: Synthetic oligonucleotide
aaataaaatatccaaaca

SEQ ID NO: 455 - DNA, 18 bp, Artificial Sequence
  Description of Artificial Sequence: Synthetic oligonucleotide
ttacaaaataaaatatcc

SEQ ID NO: 456 - DNA, 18 bp, Artificial Sequence
  Description of Artificial Sequence: Synthetic oligonucleotide
tatttttacaaaataaaa

SEQ ID NO: 457 - DNA, 18 bp, Artificial Sequence
  Description of Artificial Sequence: Synthetic oligonucleotide
gattatatttttacaaaa

SEQ ID NO: 458 - DNA, 18 bp, Artificial Sequence
  Description of Artificial Sequence: Synthetic oligonucleotide
ttcatgattatattttta

SEQ ID NO: 459 - DNA, 18 bp, Artificial Sequence
  Description of Artificial Sequence: Synthetic oligonucleotide
catcattcatgattatat

SEQ ID NO: 460 - DNA, 18 bp, Artificial Sequence
  Description of Artificial Sequence: Synthetic oligonucleotide
ctcaccatcattcatgat

SEQ ID NO: 461 - DNA, 18 bp, Artificial Sequence
  Description of Artificial Sequence: Synthetic oligonucleotide
ccaacctcaccatcattc

SEQ ID NO: 462 - DNA, 18 bp, Artificial Sequence
  Description of Artificial Sequence: Synthetic oligonucleotide
tatatccaacctcaccat

SEQ ID NO: 463 - DNA, 18 bp, Artificial Sequence
  Description of Artificial Sequence: Synthetic oligonucleotide
attcttatatccaacctc

SEQ ID NO: 464 - DNA, 18 bp, Artificial Sequence
  Description of Artificial Sequence: Synthetic oligonucleotide
tcatcattcttatatcca

SEQ ID NO: 465 - DNA, 18 bp, Artificial Sequence
  Description of Artificial Sequence: Synthetic oligonucleotide
cataatcatcattcttat

SEQ ID NO: 466 - DNA, 18 bp, Artificial Sequence
  Description of Artificial Sequence: Synthetic oligonucleotide
ccaatcataatcatcatt

SEQ ID NO: 467 - DNA, 18 bp, Artificial Sequence
  Description of Artificial Sequence: Synthetic oligonucleotide
acttcccaatcataatca

SEQ ID NO: 468 - DNA, 18 bp, Artificial Sequence
  Description of Artificial Sequence: Synthetic oligonucleotide
atctcacttcccaatcat

SEQ ID NO: 469 - DNA, 18 bp, Artificial Sequence
  Description of Artificial Sequence: Synthetic oligonucleotide
ttcaaatctcacttccca

SEQ ID NO: 470 - DNA, 18 bp, Artificial Sequence
  Description of Artificial Sequence: Synthetic oligonucleotide
gcatgttcaaatctcact

SEQ ID NO: 471 - DNA, 18 bp, Artificial Sequence
  Description of Artificial Sequence: Synthetic oligonucleotide
tctgagcatgttcaaatc

SEQ ID NO: 472 - DNA, 18 bp, Artificial Sequence
  Description of Artificial Sequence: Synthetic oligonucleotide
gagtttctgagcatgttc

SEQ ID NO: 473 - DNA, 18 bp, Artificial Sequence
  Description of Artificial Sequence: Synthetic oligonucleotide
aatgagagtttctgagca

SEQ ID NO: 474 - DNA, 18 bp, Artificial Sequence
  Description of Artificial Sequence: Synthetic oligonucleotide
aattaaatgagagtttct

SEQ ID NO: 475 - DNA, 18 bp, Artificial Sequence
  Description of Artificial Sequence: Synthetic oligonucleotide
caaagaattaaatgagag

SEQ ID NO: 476 - DNA, 18 bp, Artificial Sequence
  Description of Artificial Sequence: Synthetic oligonucleotide
tagggcaaagaattaaat

SEQ ID NO: 477 - DNA, 18 bp, Artificial Sequence
  Description of Artificial Sequence: Synthetic oligonucleotide
gctgctagggcaaagaat

SEQ ID NO: 478 - DNA, 18 bp, Artificial Sequence
  Description of Artificial Sequence: Synthetic oligonucleotide
tttatgctgctagggcaa

SEQ ID NO: 479 - DNA, 18 bp, Artificial Sequence
  Description of Artificial Sequence: Synthetic oligonucleotide
gtgattttatgctgctag

SEQ ID NO: 480 - DNA, 18 bp, Artificial Sequence
  Description of Artificial Sequence: Synthetic oligonucleotide
ctattgtgattttatgct

SEQ ID NO: 481 - DNA, 18 bp, Artificial Sequence
  Description of Artificial Sequence: Synthetic oligonucleotide
cgcagctattgtgatttt

SEQ ID NO: 482 - DNA, 18 bp, Artificial Sequence
  Description of Artificial Sequence: Synthetic oligonucleotide
tttgacgcagctattgtg

SEQ ID NO: 483 - DNA, 18 bp, Artificial Sequence
  Description of Artificial Sequence: Synthetic oligonucleotide
tacgctttgacgcagcta

SEQ ID NO: 484 - DNA, 18 bp, Artificial Sequence
  Description of Artificial Sequence: Synthetic oligonucleotide
tgagttacgctttgacgc

SEQ ID NO: 485 - DNA, 18 bp, Artificial Sequence
  Description of Artificial Sequence: Synthetic oligonucleotide
gtgcctgagttacgcttt

SEQ ID NO: 486 - DNA, 18 bp, Artificial Sequence
  Description of Artificial Sequence: Synthetic oligonucleotide
aatgagtgcctgagttac

SEQ ID NO: 487 - DNA, 18 bp, Artificial Sequence
  Description of Artificial Sequence: Synthetic oligonucleotide
aataaaatgagtgcctga

SEQ ID NO: 488 - DNA, 18 bp, Artificial Sequence
  Description of Artificial Sequence: Synthetic oligonucleotide
acaaaaataaaatgagtg

SEQ ID NO: 489 - DNA, 18 bp, Artificial Sequence
  Description of Artificial Sequence: Synthetic oligonucleotide
gaacaacaaaaataaaat

SEQ ID NO: 490 - DNA, 18 bp, Artificial Sequence
  Description of Artificial Sequence: Synthetic oligonucleotide
taacagaacaacaaaaat

SEQ ID NO: 491 - DNA, 18 bp, Artificial Sequence
  Description of Artificial Sequence: Synthetic oligonucleotide
aaaaataacagaacaaca

SEQ ID NO: 492 - DNA, 18 bp, Artificial Sequence
  Description of Artificial Sequence: Synthetic oligonucleotide
tttgaaaaaataacagaa

SEQ ID NO: 493 - DNA, 18 bp, Artificial Sequence
  Description of Artificial Sequence: Synthetic oligonucleotide
catgctttgaaaaaataa

SEQ ID NO: 494 - DNA, 18 bp, Artificial Sequence
  Description of Artificial Sequence: Synthetic oligonucleotide
aagcacatgctttgaaaa

SEQ ID NO: 495 - DNA, 18 bp, Artificial Sequence
  Description of Artificial Sequence: Synthetic oligonucleotide
cataaaagcacatgcttt

SEQ ID NO: 496 - DNA, 18 bp, Artificial Sequence
  Description of Artificial Sequence: Synthetic oligonucleotide
tgttgcataaaagcacat

SEQ ID NO: 497 - DNA, 18 bp, Artificial Sequence
  Description of Artificial Sequence: Synthetic oligonucleotide
agtaatgttgcataaaag

SEQ ID NO: 498 - DNA, 18 bp, Artificial Sequence
  Description of Artificial Sequence: Synthetic oligonucleotide
tattcagtaatgttgcat

SEQ ID NO: 499 - DNA, 18 bp, Artificial Sequence
  Description of Artificial Sequence: Synthetic oligonucleotide
tgctttattcagtaatgt

SEQ ID NO: 500 - DNA, 18 bp, Artificial Sequence
  Description of Artificial Sequence: Synthetic oligonucleotide
caacatgctttattcagt

SEQ ID NO: 501 - DNA, 18 bp, Artificial Sequence
  Description of Artificial Sequence: Synthetic oligonucleotide
ctgtacaacatgctttat

SEQ ID NO: 502 - DNA, 18 bp, Artificial Sequence
  Description of Artificial Sequence: Synthetic oligonucleotide
aagcactgtacaacatgc

SEQ ID NO: 503 - DNA, 18 bp, Artificial Sequence
  Description of Artificial Sequence: Synthetic oligonucleotide
ttatcaagcactgtacaa

SEQ ID NO: 504 - DNA, 18 bp, Artificial Sequence
  Description of Artificial Sequence: Synthetic oligonucleotide
acttcttatcaagcactg

SEQ ID NO: 505 - DNA, 18 bp, Artificial Sequence
  Description of Artificial Sequence: Synthetic oligonucleotide
ttctaacttcttatcaag

SEQ ID NO: 506 - DNA, 18 bp, Artificial Sequence
  Description of Artificial Sequence: Synthetic oligonucleotide
ttactttctaacttctta

SEQ ID NO: 507 - DNA, 18 bp, Artificial Sequence
  Description of Artificial Sequence: Synthetic oligonucleotide
atttgttactttctaact

SEQ ID NO: 508 - DNA, 18 bp, Artificial Sequence
  Description of Artificial Sequence: Synthetic oligonucleotide
aatttatttgttactttc

SEQ ID NO: 509 - DNA, 18 bp, Artificial Sequence
  Description of Artificial Sequence: Synthetic oligonucleotide
atgataatttatttgtta

SEQ ID NO: 510 - DNA, 18 bp, Artificial Sequence
  Description of Artificial Sequence: Synthetic oligonucleotide
acgtgatgataatttatt

SEQ ID NO: 511 - DNA, 18 bp, Artificial Sequence
  Description of Artificial Sequence: Synthetic oligonucleotide
gtgcaacgtgatgataat

SEQ ID NO: 512 - DNA, 18 bp, Artificial Sequence
  Description of Artificial Sequence: Synthetic oligonucleotide
acaaagtgcaacgtgatg

SEQ ID NO: 513 - DNA, 18 bp, Artificial Sequence
  Description of Artificial Sequence: Synthetic oligonucleotide
aaaacacaaagtgcaacg

SEQ ID NO: 514 - DNA, 18 bp, Artificial Sequence
  Description of Artificial Sequence: Synthetic oligonucleotide
catgcaaaacacaaagtg

SEQ ID NO: 515 - DNA, 18 bp, Artificial Sequence
  Description of Artificial Sequence: Synthetic oligonucleotide
taaaacatgcaaaacaca

SEQ ID NO: 516 - DNA, 18 bp, Artificial Sequence
  Description of Artificial Sequence: Synthetic oligonucleotide
gtgcataaaacatgcaaa

SEQ ID NO: 517 - DNA, 18 bp, Artificial Sequence
  Description of Artificial Sequence: Synthetic oligonucleotide
gaaatgtgcataaaacat

SEQ ID NO: 518 - DNA, 18 bp, Artificial Sequence
  Description of Artificial Sequence: Synthetic oligonucleotide
agccagaaatgtgcataa

SEQ ID NO: 519 - DNA, 18 bp, Artificial Sequence
  Description of Artificial Sequence: Synthetic oligonucleotide
ctgtcagccagaaatgtg

SEQ ID NO: 520 - DNA, 18 bp, Artificial Sequence
  Description of Artificial Sequence: Synthetic oligonucleotide
aaaagctgtcagccagaa

SEQ ID NO: 521 - DNA, 18 bp, Artificial Sequence
  Description of Artificial Sequence: Synthetic oligonucleotide
tgtttaaaagctgtcagc

SEQ ID NO: 522 - DNA, 18 bp, Artificial Sequence
  Description of Artificial Sequence: Synthetic oligonucleotide
ataaatgtttaaaagctg

SEQ ID NO: 523 - DNA, 18 bp, Artificial Sequence
  Description of Artificial Sequence: Synthetic oligonucleotide
atacaataaatgtttaaa

SEQ ID NO: 524 - DNA, 18 bp, Artificial Sequence
  Description of Artificial Sequence: Synthetic oligonucleotide
ttgaaatacaataaatgt

SEQ ID NO: 525 - DNA, 18 bp, Artificial Sequence
  Description of Artificial Sequence: Synthetic oligonucleotide
gaaatttgaaatacaata

SEQ ID NO: 526 - DNA, 18 bp, Artificial Sequence
  Description of Artificial Sequence: Synthetic oligonucleotide
gactggaaatttgaaata

SEQ ID NO: 527 - DNA, 18 bp, Artificial Sequence
  Description of Artificial Sequence: Synthetic oligonucleotide
atttggactggaaatttg

SEQ ID NO: 528 - DNA, 18 bp, Artificial Sequence
  Description of Artificial Sequence: Synthetic oligonucleotide
gaaaaatttggactggaa

SEQ ID NO: 529 - DNA, 18 bp, Artificial Sequence
  Description of Artificial Sequence: Synthetic oligonucleotide
aagttgaaaaatttggac

SEQ ID NO: 530 - DNA, 18 bp, Artificial Sequence
  Description of Artificial Sequence: Synthetic oligonucleotide
tttacaagttgaaaaatt

SEQ ID NO: 531 - DNA, 18 bp, Artificial Sequence
  Description of Artificial Sequence: Synthetic oligonucleotide
ttaattttacaagttgaa

SEQ ID NO: 532 - DNA, 18 bp, Artificial Sequence
  Description of Artificial Sequence: Synthetic oligonucleotide
tcagtttaattttacaag

SEQ ID NO: 533 - DNA, 18 bp, Artificial Sequence
  Description of Artificial Sequence: Synthetic oligonucleotide
ttcactcagtttaatttt

SEQ ID NO: 534 - DNA, 18 bp, Artificial Sequence
  Description of Artificial Sequence: Synthetic oligonucleotide
atcaattcactcagttta

SEQ ID NO: 535 - DNA, 18 bp, Artificial Sequence
  Description of Artificial Sequence: Synthetic oligonucleotide
acgacatcaattcactca

SEQ ID NO: 536 - DNA, 18 bp, Artificial Sequence
  Description of Artificial Sequence: Synthetic oligonucleotide
tattcacgacatcaattc

SEQ ID NO: 537 - DNA, 18 bp, Artificial Sequence
  Description of Artificial Sequence: Synthetic oligonucleotide
ctagatattcacgacatc

SEQ ID NO: 538 - DNA, 18 bp, Artificial Sequence
  Description of Artificial Sequence: Synthetic oligonucleotide
ttaccctagatattcacg

SEQ ID NO: 539 - DNA, 18 bp, Artificial Sequence
  Description of Artificial Sequence: Synthetic oligonucleotide
ttattttaccctagatat

SEQ ID NO: 540 - DNA, 18 bp, Artificial Sequence
  Description of Artificial Sequence: Synthetic oligonucleotide
aaattttattttacccta

SEQ ID NO: 541 - DNA, 18 bp, Artificial Sequence
  Description of Artificial Sequence: Synthetic oligonucleotide
aacacaaattttatttta

SEQ ID NO: 542 - DNA, 18 bp, Artificial Sequence
  Description of Artificial Sequence: Synthetic oligonucleotide
atttaaacacaaatttta

SEQ ID NO: 543 - DNA, 18 bp, Artificial Sequence
  Description of Artificial Sequence: Synthetic oligonucleotide
tacaaatttaaacacaaa

SEQ ID NO: 544 - DNA, 18 bp, Artificial Sequence
  Description of Artificial Sequence: Synthetic oligonucleotide
aaaaatacaaatttaaac

SEQ ID NO: 545 - DNA, 18 bp, Artificial Sequence
  Description of Artificial Sequence: Synthetic oligonucleotide
aaattaaaaatacaaatt

SEQ ID NO: 546 - DNA, 18 bp, Artificial Sequence
  Description of Artificial Sequence: Synthetic oligonucleotide
ttaggaaattaaaaatac

SEQ ID NO: 547 - DNA, 18 bp, Artificial Sequence
  Description of Artificial Sequence: Synthetic oligonucleotide
ctaggttaggaaattaaa

SEQ ID NO: 548 - DNA, 18 bp, Artificial Sequence
  Description of Artificial Sequence: Synthetic oligonucleotide
atttcctaggttaggaaa

SEQ ID NO: 549 - DNA, 18 bp, Artificial Sequence
  Description of Artificial Sequence: Synthetic oligonucleotide
ttaagatttcctaggtta

SEQ ID NO: 550 - DNA, 18 bp, Artificial Sequence
  Description of Artificial Sequence: Synthetic oligonucleotide
ggtatttaagatttccta

SEQ ID NO: 551 - DNA, 18 bp, Artificial Sequence
  Description of Artificial Sequence: Synthetic oligonucleotide
aagaaggtatttaagatt

SEQ ID NO: 552 - DNA, 18 bp, Artificial Sequence
  Description of Artificial Sequence: Synthetic oligonucleotide
tgaaaaagaaggtattta

SEQ ID NO: 553 - DNA, 18 bp, Artificial Sequence
  Description of Artificial Sequence: Synthetic oligonucleotide
tcttttgaaaaagaaggt

SEQ ID NO: 554 - DNA, 18 bp, Artificial Sequence
  Description of Artificial Sequence: Synthetic oligonucleotide
tgagttcttttgaaaaag

SEQ ID NO: 555 - DNA, 18 bp, Artificial Sequence
  Description of Artificial Sequence: Synthetic oligonucleotide
agacttgagttcttttga

SEQ ID NO: 556 - DNA, 18 bp, Artificial Sequence
  Description of Artificial Sequence: Synthetic oligonucleotide
cattaagacttgagttct

SEQ ID NO: 557 - DNA, 18 bp, Artificial Sequence
  Description of Artificial Sequence: Synthetic oligonucleotide
ctatccattaagacttga

SEQ ID NO: 558 - DNA, 18 bp, Artificial Sequence
  Description of Artificial Sequence: Synthetic oligonucleotide
tttccctatccattaaga

SEQ ID NO: 559 - DNA, 18 bp, Artificial Sequence
  Description of Artificial Sequence: Synthetic oligonucleotide
gtctgtttccctatccat

SEQ ID NO: 560 - DNA, 18 bp, Artificial Sequence
  Description of Artificial Sequence: Synthetic oligonucleotide
tttccctactgtggtgca

SEQ ID NO: 561 - DNA, 18 bp, Artificial Sequence
  Description of Artificial Sequence: Synthetic oligonucleotide
tgtattttccctactgtg

SEQ ID NO: 562 - DNA, 18 bp, Artificial Sequence
  Description of Artificial Sequence: Synthetic oligonucleotide
aataatgtattttcccta

SEQ ID NO: 563 - DNA, 18 bp, Artificial Sequence
  Description of Artificial Sequence: Synthetic oligonucleotide
atgtaaataatgtatttt

SEQ ID NO: 564 - DNA, 18 bp, Artificial Sequence
  Description of Artificial Sequence: Synthetic oligonucleotide
ttaggatgtaaataatgt

SEQ ID NO: 565 - DNA, 18 bp, Artificial Sequence
  Description of Artificial Sequence: Synthetic oligonucleotide
agggattaggatgtaaat

SEQ ID NO: 566 - DNA, 18 bp, Artificial Sequence
  Description of Artificial Sequence: Synthetic oligonucleotide
aaagagggaattaggatg

SEQ ID NO: 567 - DNA, 18 bp, Artificial Sequence
  Description of Artificial Sequence: Synthetic oligonucleotide
attgaaaagaagggatta

SEQ ID NO: 568 - DNA, 18 bp, Artificial Sequence
  Description of Artificial Sequence: Synthetic oligonucleotide
agacaattgaaaagaggg

SEQ ID NO: 569 - DNA, 18 bp, Artificial Sequence
  Description of Artificial Sequence: Synthetic oligonucleotide
atttaagacaattgaaaa

SEQ ID NO: 570 - DNA, 18 bp, Artificial Sequence
  Description of Artificial Sequence: Synthetic oligonucleotide
atgaaatttaagacaatt

SEQ ID NO: 571 - DNA, 18 bp, Artificial Sequence
  Description of Artificial Sequence: Synthetic oligonucleotide
ttcaaatgaaatttaaga

SEQ ID NO: 572 - DNA, 18 bp, Artificial Sequence
  Description of Artificial Sequence: Synthetic oligonucleotide
tttttttcaaatgaaatt

SEQ ID NO: 573 - DNA, 18 bp, Artificial Sequence
  Description of Artificial Sequence: Synthetic oligonucleotide
ttttttttttttcaaatg

SEQ ID NO: 574 - DNA, 18 bp, Artificial Sequence
  Description of Artificial Sequence: Synthetic oligonucleotide
aaggtttttttttttttc

SEQ ID NO: 575 - DNA, 18 bp, Artificial Sequence
  Description of Artificial Sequence: Synthetic oligonucleotide
tcataaaggttttttttt

SEQ ID NO: 576 - DNA, 18 bp, Artificial Sequence
  Description of Artificial Sequence: Synthetic oligonucleotide
taaattcataaaggtttt

SEQ ID NO: 577 - DNA, 18 bp, Artificial Sequence
  Description of Artificial Sequence: Synthetic oligonucleotide
gagggtaaattcataaag

SEQ ID NO: 578 - DNA, 18 bp, Artificial Sequence
  Description of Artificial Sequence: Synthetic oligonucleotide
ccacagagggtaaattca

SEQ ID NO: 579 - DNA, 18 bp, Artificial Sequence
  Description of Artificial Sequence: Synthetic oligonucleotide
aaaatccacagagggtaa

SEQ ID NO: 580 - DNA, 18 bp, Artificial Sequence
  Description of Artificial Sequence: Synthetic oligonucleotide
gggttaaaatccacagag

SEQ ID NO: 581 - DNA, 18 bp, Artificial Sequence
  Description of Artificial Sequence: Synthetic oligonucleotide
cattgggattaaaatcca

SEQ ID NO: 582 - DNA, 18 bp, Artificial Sequence
  Description of Artificial Sequence: Synthetic oligonucleotide
tcaaccattagggttaaa

SEQ ID NO: 583 - DNA, 18 bp, Artificial Sequence
  Description of Artificial Sequence: Synthetic oligonucleotide
agatatcaaccattggga

SEQ ID NO: 584 - DNA, 18 bp, Artificial Sequence
  Description of Artificial Sequence: Synthetic oligonucleotide
aataaagatatcaaccat

SEQ ID NO: 585 - DNA, 18 bp, Artificial Sequence
  Description of Artificial Sequence: Synthetic oligonucleotide
aacttaataaagatatca

SEQ ID NO: 586 - DNA, 18 bp, Artificial Sequence
  Description of Artificial Sequence: Synthetic oligonucleotide
aatgaaacttaataaaga

SEQ ID NO: 587 - DNA, 18 bp, Artificial Sequence
  Description of Artificial Sequence: Synthetic oligonucleotide
tattcaatgaaacttaat

SEQ ID NO: 588 - DNA, 18 bp, Artificial Sequence
  Description of Artificial Sequence: Synthetic oligonucleotide
aatcatattcaatgaaac

SEQ ID NO: 589 - DNA, 18 bp, Artificial Sequence
  Description of Artificial Sequence: Synthetic oligonucleotide
aactaaatcatattcaat

SEQ ID NO: 590 - DNA, 18 bp, Artificial Sequence
  Description of Artificial Sequence: Synthetic oligonucleotide
cacataactaaatcatat

SEQ ID NO: 591 - DNA, 18 bp, Artificial Sequence
  Description of Artificial Sequence: Synthetic oligonucleotide
atatacacataactaaat

SEQ ID NO: 592 - DNA, 18 bp, Artificial Sequence
  Description of Artificial Sequence: Synthetic oligonucleotide
actccatatacacataac

SEQ ID NO: 593 - DNA, 18 bp, Artificial Sequence
  Description of Artificial Sequence: Synthetic oligonucleotide
ggataactccatatacac

SEQ ID NO: 594 - DNA, 18 bp, Artificial Sequence
  Description of Artificial Sequence: Synthetic oligonucleotide
aagatggataactccata

SEQ ID NO: 595 - DNA, 18 bp, Artificial Sequence
  Description of Artificial Sequence: Synthetic oligonucleotide
ccccaaagatggataact

SEQ ID NO: 596 - DNA, 18 bp, Artificial Sequence
  Description of Artificial Sequence: Synthetic oligonucleotide
aatctccccaaagatgga

SEQ ID NO: 597 - DNA, 18 bp, Artificial Sequence
  Description of Artificial Sequence: Synthetic oligonucleotide
ccagtaatctccccaaag

SEQ ID NO: 598 - DNA, 18 bp, Artificial Sequence
  Description of Artificial Sequence: Synthetic oligonucleotide
ccaatccagtaatctccc

SEQ ID NO: 599 - DNA, 18 bp, Artificial Sequence
  Description of Artificial Sequence: Synthetic oligonucleotide
cctcaccaatccagtaat

SEQ ID NO: 600 - DNA, 18 bp, Artificial Sequence
  Description of Artificial Sequence: Synthetic oligonucleotide
cccgccctcaccaatcca

SEQ ID NO: 601 - DNA, 18 bp, Artificial Sequence
  Description of Artificial Sequence: Synthetic oligonucleotide
ggtcccccgccctcacca

SEQ ID NO: 602 - DNA, 18 bp, Artificial Sequence
  Description of Artificial Sequence: Synthetic oligonucleotide
accagggtcccccgccct

SEQ ID NO: 603 - DNA, 18 bp, Artificial Sequence
  Description of Artificial Sequence: Synthetic oligonucleotide
tctacaccagggtccccc

SEQ ID NO: 604 - DNA, 18 bp, Artificial Sequence
  Description of Artificial Sequence: Synthetic oligonucleotide
atcattctacaccagggt

SEQ ID NO: 605 - DNA, 18 bp, Artificial Sequence
  Description of Artificial Sequence: Synthetic oligonucleotide
acataatcattctacacc

SEQ ID NO: 606 - DNA, 18 bp, Artificial Sequence
  Description of Artificial Sequence: Synthetic oligonucleotide
ttttcacataatcattct

SEQ ID NO: 607 - DNA, 18 bp, Artificial Sequence
  Description of Artificial Sequence: Synthetic oligonucleotide
ttgttttttcacataatc

SEQ ID NO: 608 - DNA, 18 bp, Artificial Sequence
  Description of Artificial Sequence: Synthetic oligonucleotide
ttaaattgttttttcaca

SEQ ID NO: 609 - DNA, 18 bp, Artificial Sequence
  Description of Artificial Sequence: Synthetic oligonucleotide
acaagttaaattgttttt

SEQ ID NO: 610 - DNA, 18 bp, Artificial Sequence
  Description of Artificial Sequence: Synthetic oligonucleotide
gcttaacaagttaaattg

SEQ ID NO: 611 - DNA, 18 bp, Artificial Sequence
  Description of Artificial Sequence: Synthetic oligonucleotide
catgagcttaacaagtta

SEQ ID NO: 612 - DNA, 18 bp, Artificial Sequence
  Description of Artificial Sequence: Synthetic oligonucleotide
agtatcatgagcttaaca

SEQ ID NO: 613 - DNA, 18 bp, Artificial Sequence
  Description of Artificial Sequence: Synthetic oligonucleotide
caaacagtatcatgagct

SEQ ID NO: 614 - DNA, 18 bp, Artificial Sequence
  Description of Artificial Sequence: Synthetic oligonucleotide
tgcctcaaacagtatcat

SEQ ID NO: 615 - DNA, 18 bp, Artificial Sequence
  Description of Artificial Sequence: Synthetic oligonucleotide
ctgtatgcctcaaacagt

SEQ ID NO: 616 - DNA, 18 bp, Artificial Sequence
  Description of Artificial Sequence: Synthetic oligonucleotide
agggactgtatgcctcaa

SEQ ID NO: 617 - DNA, 18 bp, Artificial Sequence
  Description of Artificial Sequence: Synthetic oligonucleotide
acagcagggactgtatgc

SEQ ID NO: 618 - DNA, 18 bp, Artificial Sequence
  Description of Artificial Sequence: Synthetic oligonucleotide
actaaacagcaagggctg

SEQ ID NO: 619 - DNA, 18 bp, Artificial Sequence
  Description of Artificial Sequence: Synthetic oligonucleotide
aatgtactaaacagcagg

SEQ ID NO: 620 - DNA, 18 bp, Artificial Sequence
  Description of Artificial Sequence: Synthetic oligonucleotide
agaccaatgtactaaaca

SEQ ID NO: 621 - DNA, 18 bp, Artificial Sequence
  Description of Artificial Sequence: Synthetic oligonucleotide
gacccagaccaatgtact

SEQ ID NO: 622 - DNA, 18 bp, Artificial Sequence
  Description of Artificial Sequence: Synthetic oligonucleotide
ttcaggacccagaccaat

SEQ ID NO: 623 - DNA, 18 bp, Artificial Sequence
  Description of Artificial Sequence: Synthetic oligonucleotide
taattttcaggacccaga

SEQ ID NO: 624 - DNA, 18 bp, Artificial Sequence
  Description of Artificial Sequence: Synthetic oligonucleotide
actggtaattttcaggac

SEQ ID NO: 625 - DNA, 18 bp, Artificial Sequence
  Description of Artificial Sequence: Synthetic oligonucleotide
atctaactggtaattttc

SEQ ID NO: 626 - DNA, 18 bp, Artificial Sequence
  Description of Artificial Sequence: Synthetic oligonucleotide
atggtatctaactggtaa

SEQ ID NO: 627 - DNA, 18 bp, Artificial Sequence
  Description of Artificial Sequence: Synthetic oligonucleotide
aactgatggtatctaact

SEQ ID NO: 628 - DNA, 18 bp, Artificial Sequence
  Description of Artificial Sequence: Synthetic oligonucleotide
taatcaactgatggtatc

SEQ ID NO: 629 - DNA, 18 bp, Artificial Sequence
  Description of Artificial Sequence: Synthetic oligonucleotide
atcaataatcaactgatg

SEQ ID NO: 630 - DNA, 18 bp, Artificial Sequence
  Description of Artificial Sequence: Synthetic oligonucleotide
tacatatcaataatcaac

SEQ ID NO: 631 - DNA, 18 bp, Artificial Sequence
  Description of Artificial Sequence: Synthetic oligonucleotide
gctcatacatatcaataa

SEQ ID NO: 632 - DNA, 18 bp, Artificial Sequence
  Description of Artificial Sequence: Synthetic oligonucleotide
tatctgctcatacatatc

SEQ ID NO: 633 - DNA, 18 bp, Artificial Sequence
  Description of Artificial Sequence: Synthetic oligonucleotide
cctagtatctgctcatac

SEQ ID NO: 634 - DNA, 18 bp, Artificial Sequence
  Description of Artificial Sequence: Synthetic oligonucleotide
tgcaccctagtatctgct

SEQ ID NO: 635 - DNA, 18 bp, Artificial Sequence
  Description of Artificial Sequence: Synthetic oligonucleotide
aatattgcaccctagtat

SEQ ID NO: 636 - DNA, 18 bp, Artificial Sequence
  Description of Artificial Sequence: Synthetic oligonucleotide
cctgaaatattgcaccct

SEQ ID NO: 637 - DNA, 18 bp, Artificial Sequence
  Description of Artificial Sequence: Synthetic oligonucleotide
tgaaacctgaaatattgc

SEQ ID NO: 638 - DNA, 18 bp, Artificial Sequence
  Description of Artificial Sequence: Synthetic oligonucleotide
tcttatgaaacctgaaat

SEQ ID NO: 639 - DNA, 18 bp, Artificial Sequence
  Description of Artificial Sequence: Synthetic oligonucleotide
accagtcttatgaaacct

SEQ ID NO: 640 - DNA, 18 bp, Artificial Sequence
  Description of Artificial Sequence: Synthetic oligonucleotide
tcaataccagtcttatga

SEQ ID NO: 641 - DNA, 18 bp, Artificial Sequence
  Description of Artificial Sequence: Synthetic oligonucleotide
cacaatcaataccagtct

SEQ ID NO: 642 - DNA, 18 bp, Artificial Sequence
  Description of Artificial Sequence: Synthetic oligonucleotide
gtggtcacaatcaatacc

SEQ ID NO: 643 - DNA, 18 bp, Artificial Sequence
  Description of Artificial Sequence: Synthetic oligonucleotide
tgagagtggtcacaatca

SEQ ID NO: 644 - DNA, 18 bp, Artificial Sequence
  Description of Artificial Sequence: Synthetic oligonucleotide
aaaaatgagagtggtcac

SEQ ID NO: 645 - DNA, 18 bp, Artificial Sequence
  Description of Artificial Sequence: Synthetic oligonucleotide
caataaaaaatgagagtg

SEQ ID NO: 646 - DNA, 18 bp, Artificial Sequence
  Description of Artificial Sequence: Synthetic oligonucleotide
ttacacaataaaaaatga

SEQ ID NO: 647 - DNA, 18 bp, Artificial Sequence
  Description of Artificial Sequence: Synthetic oligonucleotide
tgaacttacacaataaaa

SEQ ID NO: 648 - DNA, 18 bp, Artificial Sequence
  Description of Artificial Sequence: Synthetic oligonucleotide
ccatatgaacttacacaa

SEQ ID NO: 649 - DNA, 18 bp, Artificial Sequence
  Description of Artificial Sequence: Synthetic oligonucleotide
taaccccatatgaactta

SEQ ID NO: 650 - DNA, 18 bp, Artificial Sequence
  Description of Artificial Sequence: Synthetic oligonucleotide
gaaaataaccccatatga

SEQ ID NO: 651 - DNA, 18 bp, Artificial Sequence
  Description of Artificial Sequence: Synthetic oligonucleotide
attttgaaaataacccca

SEQ ID NO: 652 - DNA, 18 bp, Artificial Sequence
  Description of Artificial Sequence: Synthetic oligonucleotide
ttaacattttgaaaataa

SEQ ID NO: 653 - DNA, 18 bp, Artificial Sequence
  Description of Artificial Sequence: Synthetic oligonucleotide
ccttgttaacattttgaa

SEQ ID NO: 654 - DNA, 18 bp, Artificial Sequence
  Description of Artificial Sequence: Synthetic oligonucleotide
ttttgccttgttaacatt

SEQ ID NO: 655 - DNA, 18 bp, Artificial Sequence
  Description of Artificial Sequence: Synthetic oligonucleotide
tatatttttgccttgtta

SEQ ID NO: 656 - DNA, 18 bp, Artificial Sequence
  Description of Artificial Sequence: Synthetic oligonucleotide
cttaatatatttttgcct

SEQ ID NO: 657 - DNA, 18 bp, Artificial Sequence
  Description of Artificial Sequence: Synthetic oligonucleotide
tatttcttaatatatttt

SEQ ID NO: 658 - DNA, 18 bp, Artificial Sequence
  Description of Artificial Sequence: Synthetic oligonucleotide
tcaactatttcttaatat

SEQ ID NO: 659 - DNA, 18 bp, Artificial Sequence
  Description of Artificial Sequence: Synthetic oligonucleotide
cttattcaactatttctt

SEQ ID NO: 660 - DNA, 18 bp, Artificial Sequence
  Description of Artificial Sequence: Synthetic oligonucleotide
atgtgcttattcaactat

SEQ ID NO: 661 - DNA, 18 bp, Artificial Sequence
  Description of Artificial Sequence: Synthetic oligonucleotide
ttcacatgtgcttattca

SEQ ID NO: 662 - DNA, 18 bp, Artificial Sequence
  Description of Artificial Sequence: Synthetic oligonucleotide
cacaattcacatgtgctt

SEQ ID NO: 663 - DNA, 18 bp, Artificial Sequence
  Description of Artificial Sequence: Synthetic oligonucleotide
tacaacacaattcacatg

SEQ ID NO: 664 - DNA, 18 bp, Artificial Sequence
  Description of Artificial Sequence: Synthetic oligonucleotide
ttgtttacaacacaattc

SEQ ID NO: 665 - DNA, 18 bp, Artificial Sequence
  Description of Artificial Sequence: Synthetic oligonucleotide
actttttgtttacaacac

SEQ ID NO: 666 - DNA, 18 bp, Artificial Sequence
  Description of Artificial Sequence: Synthetic oligonucleotide
ttctaactttttgtttac

SEQ ID NO: 667 - DNA, 18 bp, Artificial Sequence
  Description of Artificial Sequence: Synthetic oligonucleotide
ttttattctaactttttg

SEQ ID NO: 668 - DNA, 18 bp, Artificial Sequence
  Description of Artificial Sequence: Synthetic oligonucleotide
gatttttttattctaact

SEQ ID NO: 669 - DNA, 18 bp, Artificial Sequence
  Description of Artificial Sequence: Synthetic oligonucleotide
aagtggatttttttattc

SEQ ID NO: 670 - DNA, 18 bp, Artificial Sequence
  Description of Artificial Sequence: Synthetic oligonucleotide
caaataagtggatttttt

SEQ ID NO: 671 - DNA, 18 bp, Artificial Sequence
  Description of Artificial Sequence: Synthetic oligonucleotide
taattcaaataagtggat

SEQ ID NO: 672 - DNA, 18 bp, Artificial Sequence
  Description of Artificial Sequence: Synthetic oligonucleotide
ctgcataattcaaataag

SEQ ID NO: 673 - DNA, 18 bp, Artificial Sequence
  Description of Artificial Sequence: Synthetic oligonucleotide
ctattctgcataattcaa

SEQ ID NO: 674 - DNA, 18 bp, Artificial Sequence
  Description of Artificial Sequence: Synthetic oligonucleotide
gtattctattctgcataa

SEQ ID NO: 675 - DNA, 18 bp, Artificial Sequence
  Description of Artificial Sequence: Synthetic oligonucleotide
ggtatgtattctattctg

SEQ ID NO: 676 - DNA, 18 bp, Artificial Sequence
  Description of Artificial Sequence: Synthetic oligonucleotide
ttctaggtatgtattcta

SEQ ID NO: 677 - DNA, 18 bp, Artificial Sequence
  Description of Artificial Sequence: Synthetic oligonucleotide
tttatttctaggtatgta

SEQ ID NO: 678 - DNA, 18 bp, Artificial Sequence
  Description of Artificial Sequence: Synthetic oligonucleotide
tttgttttatttctaggt

SEQ ID NO: 679 - DNA, 18 bp, Artificial Sequence
  Description of Artificial Sequence: Synthetic oligonucleotide
acgtttttgttttatttc

SEQ ID NO: 680 - DNA, 18 bp, Artificial Sequence
  Description of Artificial Sequence: Synthetic oligonucleotide
ataagacgtttttgtttt

SEQ ID NO: 681 - DNA, 18 bp, Artificial Sequence
  Description of Artificial Sequence: Synthetic oligonucleotide
tcatgataagacgttttt

SEQ ID NO: 682 - DNA, 18 bp, Artificial Sequence
  Description of Artificial Sequence: Synthetic oligonucleotide
aatactcatgataagacg

SEQ ID NO: 683 - DNA, 18 bp, Artificial Sequence
  Description of Artificial Sequence: Synthetic oligonucleotide
atcttaatactcatgata

SEQ ID NO: 684 - DNA, 18 bp, Artificial Sequence
  Description of Artificial Sequence: Synthetic oligonucleotide
attttatcttaatactca

SEQ ID NO: 685 - DNA, 18 bp, Artificial Sequence
  Description of Artificial Sequence: Synthetic oligonucleotide
cttaaattttatcttaat

SEQ ID NO: 686 - DNA, 18 bp, Artificial Sequence
  Description of Artificial Sequence: Synthetic oligonucleotide
tatgccttaaattttatc

SEQ ID NO: 687 - DNA, 18 bp, Artificial Sequence
  Description of Artificial Sequence: Synthetic oligonucleotide
gagtttatgccttaaatt

SEQ ID NO: 688 - DNA, 18 bp, Artificial Sequence
  Description of Artificial Sequence: Synthetic oligonucleotide
gaagtgagtttatgcctt

SEQ ID NO: 689 - DNA, 18 bp, Artificial Sequence
  Description of Artificial Sequence: Synthetic oligonucleotide
tctaagaagtgagtttat

SEQ ID NO: 690 - DNA, 18 bp, Artificial Sequence
  Description of Artificial Sequence: Synthetic oligonucleotide
cttattctaagaagtgag

SEQ ID NO: 691 - DNA, 18 bp, Artificial Sequence
  Description of Artificial Sequence: Synthetic oligonucleotide
agttacttattctaagaa

SEQ ID NO: 692 - DNA, 18 bp, Artificial Sequence
  Description of Artificial Sequence: Synthetic oligonucleotide
ttgggagttacttattct

SEQ ID NO: 693 - DNA, 18 bp, Artificial Sequence
  Description of Artificial Sequence: Synthetic oligonucleotide
gttagttgggagttactt

SEQ ID NO: 694 - DNA, 18 bp, Artificial Sequence
  Description of Artificial Sequence: Synthetic oligonucleotide
agaaagttagttgggagt

SEQ ID NO: 695 - DNA, 18 bp, Artificial Sequence
  Description of Artificial Sequence: Synthetic oligonucleotide
atcctagaaagttagttg

SEQ ID NO: 696 - DNA, 18 bp, Artificial Sequence
  Description of Artificial Sequence: Synthetic oligonucleotide
ttaaaatcctagaaagtt

SEQ ID NO: 697 - DNA, 18 bp, Artificial Sequence
  Description of Artificial Sequence: Synthetic oligonucleotide
atgttttaaaatcctaga

SEQ ID NO: 698 - DNA, 18 bp, Artificial Sequence
  Description of Artificial Sequence: Synthetic oligonucleotide
gtgttatgttttaaaatc

SEQ ID NO: 699 - DNA, 18 bp, Artificial Sequence
  Description of Artificial Sequence: Synthetic oligonucleotide
tcactgtgttatgtttta

SEQ ID NO: 700 - DNA, 18 bp, Artificial Sequence
  Description of Artificial Sequence: Synthetic oligonucleotide
tgttttcactgtgttatg

SEQ ID NO: 701 - DNA, 18 bp, Artificial Sequence
  Description of Artificial Sequence: Synthetic oligonucleotide
atgtatgttttcactgtg

SEQ ID NO: 702 - DNA, 18 bp, Artificial Sequence
  Description of Artificial Sequence: Synthetic oligonucleotide
tgtttatgtatgttttca

SEQ ID NO: 703 - DNA, 18 bp, Artificial Sequence
  Description of Artificial Sequence: Synthetic oligonucleotide
agttatgtttatgtatgt

SEQ ID NO: 704 - DNA, 18 bp, Artificial Sequence
  Description of Artificial Sequence: Synthetic oligonucleotide
tgtagagttatgtttatg

SEQ ID NO: 705 - DNA, 18 bp, Artificial Sequence
  Description of Artificial Sequence: Synthetic oligonucleotide
taaaatgtagagttatgt

SEQ ID NO: 706 - DNA, 18 bp, Artificial Sequence
  Description of Artificial Sequence: Synthetic oligonucleotide
ataaataaaatgtagagt

SEQ ID NO: 707 - DNA, 18 bp, Artificial Sequence
  Description of Artificial Sequence: Synthetic oligonucleotide
taagaataaataaaatgt

SEQ ID NO: 708 - DNA, 18 bp, Artificial Sequence
  Description of Artificial Sequence: Synthetic oligonucleotide
aactttaagaataaataa

SEQ ID NO: 709 - DNA, 18 bp, Artificial Sequence
  Description of Artificial Sequence: Synthetic oligonucleotide
acttaaactttaagaata

SEQ ID NO: 710 - DNA, 18 bp, Artificial Sequence
  Description of Artificial Sequence: Synthetic oligonucleotide
aatacacttaaactttaa

SEQ ID NO: 711 - DNA, 18 bp, Artificial Sequence
  Description of Artificial Sequence: Synthetic oligonucleotide
tgtataatacacttaaac

SEQ ID NO: 712 - DNA, 18 bp, Artificial Sequence
  Description of Artificial Sequence: Synthetic oligonucleotide
cttcttgtataatacact

SEQ ID NO: 713 - DNA, 18 bp, Artificial Sequence
  Description of Artificial Sequence: Synthetic oligonucleotide
ctcttcttcttgtataat

SEQ ID NO: 714 - DNA, 18 bp, Artificial Sequence
  Description of Artificial Sequence: Synthetic oligonucleotide
ataaactcttcttcttgt

SEQ ID NO: 715 - DNA, 18 bp, Artificial Sequence
  Description of Artificial Sequence: Synthetic oligonucleotide
cgaatataaactcttctt

SEQ ID NO: 716 - DNA, 18 bp, Artificial Sequence
  Description of Artificial Sequence: Synthetic oligonucleotide
tctctcgaatataaactc

SEQ ID NO: 717 - DNA, 18 bp, Artificial Sequence
  Description of Artificial Sequence: Synthetic oligonucleotide
ttctgtctctcgaatata

SEQ ID NO: 718 - DNA, 18 bp, Artificial Sequence
  Description of Artificial Sequence: Synthetic oligonucleotide
actttttctgtctctcga

SEQ ID NO: 719 - DNA, 18 bp, Artificial Sequence
  Description of Artificial Sequence: Synthetic oligonucleotide
ttctgactttttctgtct

SEQ ID NO: 720 - DNA, 18 bp, Artificial Sequence
  Description of Artificial Sequence: Synthetic oligonucleotide
aaaaattctgactttttc

SEQ ID NO: 721 - DNA, 18 bp, Artificial Sequence
  Description of Artificial Sequence: Synthetic oligonucleotide
caaacaaaaattctgact

SEQ ID NO: 722 - DNA, 18 bp, Artificial Sequence
  Description of Artificial Sequence: Synthetic oligonucleotide
tgatccaaacaaaaattc

SEQ ID NO: 723 - DNA, 18 bp, Artificial Sequence
  Description of Artificial Sequence: Synthetic oligonucleotide
attggtgatccaaacaaa

SEQ ID NO: 724 - DNA, 18 bp, Artificial Sequence
  Description of Artificial Sequence: Synthetic oligonucleotide
gatatattggtgatccaa

SEQ ID NO: 725 - DNA, 18 bp, Artificial Sequence
  Description of Artificial Sequence: Synthetic oligonucleotide
gctatgatatattggtga

SEQ ID NO: 726 - DNA, 18 bp, Artificial Sequence
  Description of Artificial Sequence: Synthetic oligonucleotide
tgtaagctatgatatatt

SEQ ID NO: 727 - DNA, 18 bp, Artificial Sequence
  Description of Artificial Sequence: Synthetic oligonucleotide
ttttttgtaagctatgat

SEQ ID NO: 728 - DNA, 18 bp, Artificial Sequence
  Description of Artificial Sequence: Synthetic oligonucleotide
acagtttttttgtaagct

SEQ ID NO: 729 - DNA, 18 bp, Artificial Sequence
  Description of Artificial Sequence: Synthetic oligonucleotide
ttaagacagtttttttgt

SEQ ID NO: 730 - DNA, 18 bp, Artificial Sequence
  Description of Artificial Sequence: Synthetic oligonucleotide
tttaattaagacagtttt

SEQ ID NO: 731 - DNA, 18 bp, Artificial Sequence
  Description of Artificial Sequence: Synthetic oligonucleotide
tgggttttaattaagaca

SEQ ID NO: 732 - DNA, 18 bp, Artificial Sequence
  Description of Artificial Sequence: Synthetic oligonucleotide
tgttgtgggttttaatta

SEQ ID NO: 733 - DNA, 18 bp, Artificial Sequence
  Description of Artificial Sequence: Synthetic oligonucleotide
aattatgttgtgggtttt

SEQ ID NO: 734 - DNA, 18 bp, Artificial Sequence
  Description of Artificial Sequence: Synthetic oligonucleotide
aaaaaaattatgttgtgg

SEQ ID NO: 735 - DNA, 18 bp, Artificial Sequence
  Description of Artificial Sequence: Synthetic oligonucleotide
aatctaaaaaaattatgt

SEQ ID NO: 736 - DNA, 18 bp, Artificial Sequence
  Description of Artificial Sequence: Synthetic oligonucleotide
ttaaaaatctaaaaaaat

SEQ ID NO: 737 - DNA, 18 bp, Artificial Sequence
  Description of Artificial Sequence: Synthetic oligonucleotide
ctttcttaaaaatctaaa

SEQ ID NO: 738 - DNA, 18 bp, Artificial Sequence
  Description of Artificial Sequence: Synthetic oligonucleotide
agaatctttcttaaaaat

SEQ ID NO: 739 - DNA, 18 bp, Artificial Sequence
  Description of Artificial Sequence: Synthetic oligonucleotide
ataatagaatctttctta

SEQ ID NO: 740 - RNA, 18 nt, Artificial Sequence
  Description of Artificial Sequence: Synthetic oligonucleotide
augaauuuaauaaacuuu

SEQ ID NO: 741 - RNA, 18 nt, Artificial Sequence
  Description of Artificial Sequence: Synthetic oligonucleotide
gaccaaugaauuuaauaa

SEQ ID NO: 742 - RNA, 18 nt, Artificial Sequence
  Description of Artificial Sequence: Synthetic oligonucleotide
cacuugaccaaugaauuu

SEQ ID NO: 743 - RNA, 18 nt, Artificial Sequence
  Description of Artificial Sequence: Synthetic oligonucleotide
cugagcacuugaccaaug

SEQ ID NO: 744 - RNA, 18 nt, Artificial Sequence
  Description of Artificial Sequence: Synthetic oligonucleotide
aauaucugagcacuugac

SEQ ID NO: 745 - RNA, 18 nt, Artificial Sequence
  Description of Artificial Sequence: Synthetic oligonucleotide
auggaaauaucugagcac

SEQ ID NO: 746 - RNA, 18 nt, Artificial Sequence
  Description of Artificial Sequence: Synthetic oligonucleotide
aauguauggaaauaucug

SEQ ID NO: 747 - RNA, 18 nt, Artificial Sequence
  Description of Artificial Sequence: Synthetic oligonucleotide
aguguaauguauggaaau

SEQ ID NO: 748 - RNA, 18 nt, Artificial Sequence
  Description of Artificial Sequence: Synthetic oligonucleotide
aaugaaguguaauguaug

SEQ ID NO: 749 - RNA, 18 nt, Artificial Sequence
  Description of Artificial Sequence: Synthetic oligonucleotide
auagaaaugaaguguaau

SEQ ID NO: 750 - RNA, 18 nt, Artificial Sequence
  Description of Artificial Sequence: Synthetic oligonucleotide
uuuuuauagaaaugaagu

SEQ ID NO: 751 - RNA, 18 nt, Artificial Sequence
  Description of Artificial Sequence: Synthetic oligonucleotide
cagcuuuuuuauagaaau

SEQ ID NO: 752 - RNA, 18 nt, Artificial Sequence
  Description of Artificial Sequence: Synthetic oligonucleotide
aagaucagcuuuuuuaua

SEQ ID NO: 753 - RNA, 18 nt, Artificial Sequence
  Description of Artificial Sequence: Synthetic oligonucleotide
ccgauaagaucagcuuuu

SEQ ID NO: 754 - RNA, 18 nt, Artificial Sequence
  Description of Artificial Sequence: Synthetic oligonucleotide
guauaccgauaagaucag

SEQ ID NO: 755 - RNA, 18 nt, Artificial Sequence
  Description of Artificial Sequence: Synthetic oligonucleotide
uaaaaguauaccgauaag

SEQ ID NO: 756 - RNA, 18 nt, Artificial Sequence
  Description of Artificial Sequence: Synthetic oligonucleotide
aaaauuaaaaguauaccg

SEQ ID NO: 757 - RNA, 18 nt, Artificial Sequence
  Description of Artificial Sequence: Synthetic oligonucleotide
cugagaaaauuaaaagua

SEQ ID NO: 758 - RNA, 18 nt, Artificial Sequence
  Description of Artificial Sequence: Synthetic oligonucleotide
uauuucugagaaaauuaa

SEQ ID NO: 759 - RNA, 18 nt, Artificial Sequence
  Description of Artificial Sequence: Synthetic oligonucleotide
augguuauuucugagaaa

SEQ ID NO: 760 - RNA, 18 nt, Artificial Sequence
  Description of Artificial Sequence: Synthetic oligonucleotide
uagauaugguuauuucug

SEQ ID NO: 761 - RNA, 18 nt, Artificial Sequence
  Description of Artificial Sequence: Synthetic oligonucleotide
aauuauagauaugguuau

SEQ ID NO: 762 - RNA, 18 nt, Artificial Sequence
  Description of Artificial Sequence: Synthetic oligonucleotide
uuaauaauuauagauaug

SEQ ID NO: 763 - RNA, 18 nt, Artificial Sequence
  Description of Artificial Sequence: Synthetic oligonucleotide
auugauuaauaauuauag

SEQ ID NO: 764 - RNA, 18 nt, Artificial Sequence
  Description of Artificial Sequence: Synthetic oligonucleotide
gcauuauugauuaauaau

SEQ ID NO: 765 - RNA, 18 nt, Artificial Sequence
  Description of Artificial Sequence: Synthetic oligonucleotide
aaaaggcauuauugauua

SEQ ID NO: 766 - RNA, 18 nt, Artificial Sequence
  Description of Artificial Sequence: Synthetic oligonucleotide
aauauaaaaggcauuauu

SEQ ID NO: 767 - RNA, 18 nt, Artificial Sequence
  Description of Artificial Sequence: Synthetic oligonucleotide
cuuuuaauauaaaaggca

SEQ ID NO: 768 - RNA, 18 nt, Artificial Sequence
  Description of Artificial Sequence: Synthetic oligonucleotide
aaccucuuuuaauauaaa

SEQ ID NO: 769 - RNA, 18 nt, Artificial Sequence
  Description of Artificial Sequence: Synthetic oligonucleotide
aaacuaaccucuuuuaau

SEQ ID NO: 770 - RNA, 18 nt, Artificial Sequence
  Description of Artificial Sequence: Synthetic oligonucleotide
uucaaaaacuaaccucuu

SEQ ID NO: 771 - RNA, 18 nt, Artificial Sequence
  Description of Artificial Sequence: Synthetic oligonucleotide
caaguuucaaaaacuaac

SEQ ID NO: 772 - RNA, 18 nt, Artificial Sequence
  Description of Artificial Sequence: Synthetic oligonucleotide
aacuccaaguuucaaaaa

SEQ ID NO: 773 - RNA, 18 nt, Artificial Sequence
  Description of Artificial Sequence: Synthetic oligonucleotide
ucuaaaacuccaaguuuc

SEQ ID NO: 774 - RNA, 18 nt, Artificial Sequence
  Description of Artificial Sequence: Synthetic oligonucleotide
uuaugucuaaaacuccaa

SEQ ID NO: 775 - RNA, 18 nt, Artificial Sequence
  Description of Artificial Sequence: Synthetic oligonucleotide
ggauuuuaugucuaaaac

SEQ ID NO: 776 - RNA, 18 nt, Artificial Sequence
  Description of Artificial Sequence: Synthetic oligonucleotide
uauaaggauuuuaugucu

SEQ ID NO: 777 - RNA, 18 nt, Artificial Sequence
  Description of Artificial Sequence: Synthetic oligonucleotide
gcauuuauaaggauuuua

SEQ ID NO: 778 - RNA, 18 nt, Artificial Sequence
  Description of Artificial Sequence: Synthetic oligonucleotide
uaucagcauuuauaagga

SEQ ID NO: 779 - RNA, 18 nt, Artificial Sequence
  Description of Artificial Sequence: Synthetic oligonucleotide
aucacuaucagcauuuau

SEQ ID NO: 780 - RNA, 18 nt, Artificial Sequence
  Description of Artificial Sequence: Synthetic oligonucleotide
guuauaucacuaucagca

SEQ ID NO: 781 - RNA, 18 nt, Artificial Sequence
  Description of Artificial Sequence: Synthetic oligonucleotide
uauuaguuauaucacuau

SEQ ID NO: 782 - RNA, 18 nt, Artificial Sequence
  Description of Artificial Sequence: Synthetic oligonucleotide
uaaacuauuaguuauauc

SEQ ID NO: 783 - RNA, 18 nt, Artificial Sequence
  Description of Artificial Sequence: Synthetic oligonucleotide
ccauuuaaacuauuaguu

SEQ ID NO: 784 - RNA, 18 nt, Artificial Sequence
  Description of Artificial Sequence: Synthetic oligonucleotide
ucugaccauuuaaacuau

SEQ ID NO: 785 - RNA, 18 nt, Artificial Sequence
  Description of Artificial Sequence: Synthetic oligonucleotide
auaaaucugaccauuuaa

SEQ ID NO: 786 - RNA, 18 nt, Artificial Sequence
  Description of Artificial Sequence: Synthetic oligonucleotide
uauucauaaaucugacca

SEQ ID NO: 787 - RNA, 18 nt, Artificial Sequence
  Description of Artificial Sequence: Synthetic oligonucleotide
agccauauucauaaaucu

SEQ ID NO: 788 - RNA, 18 nt, Artificial Sequence
  Description of Artificial Sequence: Synthetic oligonucleotide
aauagagccauauucaua

SEQ ID NO: 789 - RNA, 18 nt, Artificial Sequence
  Description of Artificial Sequence: Synthetic oligonucleotide
ugaggaauagagccauau

SEQ ID NO: 790 - RNA, 18 nt, Artificial Sequence
  Description of Artificial Sequence: Synthetic oligonucleotide
cauuaugaggaauagagc

SEQ ID NO: 791 - RNA, 18 nt, Artificial Sequence
  Description of Artificial Sequence: Synthetic oligonucleotide
guugucauuaugaggaau

SEQ ID NO: 792 - RNA, 18 nt, Artificial Sequence
  Description of Artificial Sequence: Synthetic oligonucleotide
uguauguugucauuauga

SEQ ID NO: 793 - RNA, 18 nt, Artificial Sequence
  Description of Artificial Sequence: Synthetic oligonucleotide
cuguguguauguugucau

SEQ ID NO: 794 - RNA, 18 nt, Artificial Sequence
  Description of Artificial Sequence: Synthetic oligonucleotide
uagugcuguguguauguu

SEQ ID NO: 795 - RNA, 18 nt, Artificial Sequence
  Description of Artificial Sequence: Synthetic oligonucleotide
cauuuuagugcugugugu

SEQ ID NO: 796 - RNA, 18 nt, Artificial Sequence
  Description of Artificial Sequence: Synthetic oligonucleotide
uuagucauuuuagugcug

SEQ ID NO: 797 - RNA, 18 nt, Artificial Sequence
  Description of Artificial Sequence: Synthetic oligonucleotide
agagauuagucauuuuag

SEQ ID NO: 798 - RNA, 18 nt, Artificial Sequence
  Description of Artificial Sequence: Synthetic oligonucleotide
auugaagagauuagucau

SEQ ID NO: 799 - RNA, 18 nt, Artificial Sequence
  Description of Artificial Sequence: Synthetic oligonucleotide
cacguauugaagagauua

SEQ ID NO: 800 - RNA, 18 nt, Artificial Sequence
  Description of Artificial Sequence: Synthetic oligonucleotide
ccaaacacguauugaaga

SEQ ID NO: 801 - RNA, 18 nt, Artificial Sequence
  Description of Artificial Sequence: Synthetic oligonucleotide
caaugccaaacacguauu

SEQ ID NO: 802 - RNA, 18 nt, Artificial Sequence
  Description of Artificial Sequence: Synthetic oligonucleotide
cucuacaaugccaaacac

SEQ ID NO: 803 - RNA, 18 nt, Artificial Sequence
  Description of Artificial Sequence: Synthetic oligonucleotide
uuugacucuacaaugcca

SEQ ID NO: 804 - RNA, 18 nt, Artificial Sequence
  Description of Artificial Sequence: Synthetic oligonucleotide
guuauuuugacucuacaa

SEQ ID NO: 805 - RNA, 18 nt, Artificial Sequence
  Description of Artificial Sequence: Synthetic oligonucleotide
auaacguuauuuugacuc

SEQ ID NO: 806 - RNA, 18 nt, Artificial Sequence
  Description of Artificial Sequence: Synthetic oligonucleotide
caauuauaacguuauuuu

SEQ ID NO: 807 - RNA, 18 nt, Artificial Sequence
  Description of Artificial Sequence: Synthetic oligonucleotide
agaaucaauuauaacguu

SEQ ID NO: 808 - RNA, 18 nt, Artificial Sequence
  Description of Artificial Sequence: Synthetic oligonucleotide
aaaauagaaucaauuaua

SEQ ID NO: 809 - RNA, 18 nt, Artificial Sequence
  Description of Artificial Sequence: Synthetic oligonucleotide
uauaaaaaauagaaucaa

SEQ ID NO: 810 - RNA, 18 nt, Artificial Sequence
  Description of Artificial Sequence: Synthetic oligonucleotide
agaaguauaaaaaauaga

SEQ ID NO: 811 - RNA, 18 nt, Artificial Sequence
  Description of Artificial Sequence: Synthetic oligonucleotide
acacuagaaguauaaaaa

SEQ ID NO: 812 - RNA, 18 nt, Artificial Sequence
  Description of Artificial Sequence: Synthetic oligonucleotide
uccaaacacuagaaguau

SEQ ID NO: 813 - RNA, 18 nt, Artificial Sequence
  Description of Artificial Sequence: Synthetic oligonucleotide
aaauauccaaacacuaga

SEQ ID NO: 814 - RNA, 18 nt, Artificial Sequence
  Description of Artificial Sequence: Synthetic oligonucleotide
aaauaaaauauccaaaca

SEQ ID NO: 815 - RNA, 18 nt, Artificial Sequence
  Description of Artificial Sequence: Synthetic oligonucleotide
uuacaaaauaaaauaucc

SEQ ID NO: 816 - RNA, 18 nt, Artificial Sequence
  Description of Artificial Sequence: Synthetic oligonucleotide
uauuuuuacaaaauaaaa

SEQ ID NO: 817 - RNA, 18 nt, Artificial Sequence
  Description of Artificial Sequence: Synthetic oligonucleotide
gauuauauuuuuacaaaa

SEQ ID NO: 818 - RNA, 18 nt, Artificial Sequence
  Description of Artificial Sequence: Synthetic oligonucleotide
uucaugauuauauuuuua

SEQ ID NO: 819 - RNA, 18 nt, Artificial Sequence
  Description of Artificial Sequence: Synthetic oligonucleotide
caucauucaugauuauau

SEQ ID NO: 820 - RNA, 18 nt, Artificial Sequence
  Description of Artificial Sequence: Synthetic oligonucleotide
cucaccaucauucaugau

SEQ ID NO: 821 - RNA, 18 nt, Artificial Sequence
  Description of Artificial Sequence: Synthetic oligonucleotide
ccaaccucaccaucauuc

SEQ ID NO: 822 - RNA, 18 nt, Artificial Sequence
  Description of Artificial Sequence: Synthetic oligonucleotide
uauauccaaccucaccau

SEQ ID NO: 823 - RNA, 18 nt, Artificial Sequence
  Description of Artificial Sequence: Synthetic oligonucleotide
auucuuauauccaaccuc

SEQ ID NO: 824 - RNA, 18 nt, Artificial Sequence
  Description of Artificial Sequence: Synthetic oligonucleotide
ucaucauucuuauaucca

SEQ ID NO: 825 - RNA, 18 nt, Artificial Sequence
  Description of Artificial Sequence: Synthetic oligonucleotide
cauaaucaucauucuuau

SEQ ID NO: 826 - RNA, 18 nt, Artificial Sequence
  Description of Artificial Sequence: Synthetic oligonucleotide
ccaaucauaaucaucauu

SEQ ID NO: 827 - RNA, 18 nt, Artificial Sequence
  Description of Artificial Sequence: Synthetic oligonucleotide
acuucccaaucauaauca

SEQ ID NO: 828 - RNA, 18 nt, Artificial Sequence
  Description of Artificial Sequence: Synthetic oligonucleotide
aucucacuucccaaucau

SEQ ID NO: 829 - RNA, 18 nt, Artificial Sequence
  Description of Artificial Sequence: Synthetic oligonucleotide
uucaaaucucacuuccca

SEQ ID NO: 830 - RNA, 18 nt, Artificial Sequence
  Description of Artificial Sequence: Synthetic oligonucleotide
gcauguucaaaucucacu

SEQ ID NO: 831 - RNA, 18 nt, Artificial Sequence
  Description of Artificial Sequence: Synthetic oligonucleotide
ucugagcauguucaaauc

SEQ ID NO: 832 - RNA, 18 nt, Artificial Sequence
  Description of Artificial Sequence: Synthetic oligonucleotide
gaguuucugagcauguuc

SEQ ID NO: 833 - RNA, 18 nt, Artificial Sequence
  Description of Artificial Sequence: Synthetic oligonucleotide
aaugagaguuucugagca

SEQ ID NO: 834 - RNA, 18 nt, Artificial Sequence
  Description of Artificial Sequence: Synthetic oligonucleotide
aauuaaaugagaguuucu

SEQ ID NO: 835 - RNA, 18 nt, Artificial Sequence
  Description of Artificial Sequence: Synthetic oligonucleotide
caaagaauuaaaugagag

SEQ ID NO: 836 - RNA, 18 nt, Artificial Sequence
  Description of Artificial Sequence: Synthetic oligonucleotide
uagggcaaagaauuaaau

SEQ ID NO: 837 - RNA, 18 nt, Artificial Sequence
  Description of Artificial Sequence: Synthetic oligonucleotide
gcugcuagggcaaagaau

SEQ ID NO: 838 - RNA, 18 nt, Artificial Sequence
  Description of Artificial Sequence: Synthetic oligonucleotide
uuuaugcugcuagggcaa

SEQ ID NO: 839 - RNA, 18 nt, Artificial Sequence
  Description of Artificial Sequence: Synthetic oligonucleotide
gugauuuuaugcugcuag

SEQ ID NO: 840 - RNA, 18 nt, Artificial Sequence
  Description of Artificial Sequence: Synthetic oligonucleotide
cuauugugauuuuaugcu

SEQ ID NO: 841 - RNA, 18 nt, Artificial Sequence
  Description of Artificial Sequence: Synthetic oligonucleotide
cgcagcuauugugauuuu

SEQ ID NO: 842 - RNA, 18 nt, Artificial Sequence
  Description of Artificial Sequence: Synthetic oligonucleotide
uuugacgcagcuauugug

SEQ ID NO: 843 - RNA, 18 nt, Artificial Sequence
  Description of Artificial Sequence: Synthetic oligonucleotide
uacgcuuugacgcagcua

SEQ ID NO: 844 - RNA, 18 nt, Artificial Sequence
  Description of Artificial Sequence: Synthetic oligonucleotide
ugaguuacgcuuugacgc

SEQ ID NO: 845 - RNA, 18 nt, Artificial Sequence
  Description of Artificial Sequence: Synthetic oligonucleotide
gugccugaguuacgcuuu

SEQ ID NO: 846 - RNA, 18 nt, Artificial Sequence
  Description of Artificial Sequence: Synthetic oligonucleotide
aaugagugccugaguuac

SEQ ID NO: 847 - RNA, 18 nt, Artificial Sequence
  Description of Artificial Sequence: Synthetic oligonucleotide
aauaaaaugagugccuga

SEQ ID NO: 848 - RNA, 18 nt, Artificial Sequence
  Description of Artificial Sequence: Synthetic oligonucleotide
acaaaaauaaaaugagug

SEQ ID NO: 849 - RNA, 18 nt, Artificial Sequence
  Description of Artificial Sequence: Synthetic oligonucleotide
gaacaacaaaaauaaaau

SEQ ID NO: 850 - RNA, 18 nt, Artificial Sequence
  Description of Artificial Sequence: Synthetic oligonucleotide
uaacagaacaacaaaaau

SEQ ID NO: 851 - RNA, 18 nt, Artificial Sequence
  Description of Artificial Sequence: Synthetic oligonucleotide
aaaaauaacagaacaaca

SEQ ID NO: 852 - RNA, 18 nt, Artificial Sequence
  Description of Artificial Sequence: Synthetic oligonucleotide
uuugaaaaaauaacagaa

SEQ ID NO: 853 - RNA, 18 nt, Artificial Sequence
  Description of Artificial Sequence: Synthetic oligonucleotide
caugcuuugaaaaaauaa

SEQ ID NO: 854 - RNA, 18 nt, Artificial Sequence
  Description of Artificial Sequence: Synthetic oligonucleotide
aagcacaugcuuugaaaa

SEQ ID NO: 855 - RNA, 18 nt, Artificial Sequence
  Description of Artificial Sequence: Synthetic oligonucleotide
cauaaaagcacaugcuuu

SEQ ID NO: 856 - RNA, 18 nt, Artificial Sequence
  Description of Artificial Sequence: Synthetic oligonucleotide
uguugcauaaaagcacau

SEQ ID NO: 857 - RNA, 18 nt, Artificial Sequence
  Description of Artificial Sequence: Synthetic oligonucleotide
aguaauguugcauaaaag

SEQ ID NO: 858 - RNA, 18 nt, Artificial Sequence
  Description of Artificial Sequence: Synthetic oligonucleotide
uauucaguaauguugcau

SEQ ID NO: 859 - RNA, 18 nt, Artificial Sequence
  Description of Artificial Sequence: Synthetic oligonucleotide
ugcuuuauucaguaaugu

SEQ ID NO: 860 - RNA, 18 nt, Artificial Sequence
  Description of Artificial Sequence: Synthetic oligonucleotide
caacaugcuuuauucagu

SEQ ID NO: 861 - RNA, 18 nt, Artificial Sequence
  Description of Artificial Sequence: Synthetic oligonucleotide
cuguacaacaugcuuuau

SEQ ID NO: 862 - RNA, 18 nt, Artificial Sequence
  Description of Artificial Sequence: Synthetic oligonucleotide
aagcacuguacaacaugc

SEQ ID NO: 863 - RNA, 18 nt, Artificial Sequence
  Description of Artificial Sequence: Synthetic oligonucleotide
uuaucaagcacuguacaa

SEQ ID NO: 864 - RNA, 18 nt, Artificial Sequence
  Description of Artificial Sequence: Synthetic oligonucleotide
acuucuuaucaagcacug

SEQ ID NO: 865 - RNA, 18 nt, Artificial Sequence
  Description of Artificial Sequence: Synthetic oligonucleotide
uucuaacuucuuaucaag

SEQ ID NO: 866 - RNA, 18 nt, Artificial Sequence
  Description of Artificial Sequence: Synthetic oligonucleotide
uuacuuucuaacuucuua

SEQ ID NO: 867 - RNA, 18 nt, Artificial Sequence
  Description of Artificial Sequence: Synthetic oligonucleotide
auuuguuacuuucuaacu

SEQ ID NO: 868 - RNA, 18 nt, Artificial Sequence
  Description of Artificial Sequence: Synthetic oligonucleotide
aauuuauuuguuacuuuc

SEQ ID NO: 869 - RNA, 18 nt, Artificial Sequence
  Description of Artificial Sequence: Synthetic oligonucleotide
augauaauuuauuuguua

SEQ ID NO: 870 - RNA, 18 nt, Artificial Sequence
  Description of Artificial Sequence: Synthetic oligonucleotide
acgugaugauaauuuauu

SEQ ID NO: 871 - RNA, 18 nt, Artificial Sequence
  Description of Artificial Sequence: Synthetic oligonucleotide
gugcaacgugaugauaau

SEQ ID NO: 872 - RNA, 18 nt, Artificial Sequence
  Description of Artificial Sequence: Synthetic oligonucleotide
acaaagugcaacgugaug

SEQ ID NO: 873 - RNA, 18 nt, Artificial Sequence
  Description of Artificial Sequence: Synthetic oligonucleotide
aaaacacaaagugcaacg

SEQ ID NO: 874 - RNA, 18 nt, Artificial Sequence
  Description of Artificial Sequence: Synthetic oligonucleotide
caugcaaaacacaaagug

SEQ ID NO: 875 - RNA, 18 nt, Artificial Sequence
  Description of Artificial Sequence: Synthetic oligonucleotide
uaaaacaugcaaaacaca

SEQ ID NO: 876 - RNA, 18 nt, Artificial Sequence
  Description of Artificial Sequence: Synthetic oligonucleotide
gugcauaaaacaugcaaa

SEQ ID NO: 877 - RNA, 18 nt, Artificial Sequence
  Description of Artificial Sequence: Synthetic oligonucleotide
gaaaugugcauaaaacau

SEQ ID NO: 878 - RNA, 18 nt, Artificial Sequence
  Description of Artificial Sequence: Synthetic oligonucleotide
agccagaaaugugcauaa

SEQ ID NO: 879 - RNA, 18 nt, Artificial Sequence
  Description of Artificial Sequence: Synthetic oligonucleotide
cugucagccagaaaugug

SEQ ID NO: 880 - RNA, 18 nt, Artificial Sequence
  Description of Artificial Sequence: Synthetic oligonucleotide
aaaagcugucagccagaa

SEQ ID NO: 881 - RNA, 18 nt, Artificial Sequence
  Description of Artificial Sequence: Synthetic oligonucleotide
uguuuaaaagcugucagc

SEQ ID NO: 882 - RNA, 18 nt, Artificial Sequence
  Description of Artificial Sequence: Synthetic oligonucleotide
auaaauguuuaaaagcug

SEQ ID NO: 883 - RNA, 18 nt, Artificial Sequence
  Description of Artificial Sequence: Synthetic oligonucleotide
auacaauaaauguuuaaa

SEQ ID NO: 884 - RNA, 18 nt, Artificial Sequence
  Description of Artificial Sequence: Synthetic oligonucleotide
uugaaauacaauaaaugu

SEQ ID NO: 885 - RNA, 18 nt, Artificial Sequence
  Description of Artificial Sequence: Synthetic oligonucleotide
gaaauuugaaauacaaua

SEQ ID NO: 886 - RNA, 18 nt, Artificial Sequence
  Description of Artificial Sequence: Synthetic oligonucleotide
gacuggaaauuugaaaua

SEQ ID NO: 887 - RNA, 18 nt, Artificial Sequence
  Description of Artificial Sequence: Synthetic oligonucleotide
auuuggacuggaaauuug

SEQ ID NO: 888 - RNA, 18 nt, Artificial Sequence
  Description of Artificial Sequence: Synthetic oligonucleotide
gaaaaauuuggacuggaa

SEQ ID NO: 889 - RNA, 18 nt, Artificial Sequence
  Description of Artificial Sequence: Synthetic oligonucleotide
aaguugaaaaauuuggac

SEQ ID NO: 890 - RNA, 18 nt, Artificial Sequence
  Description of Artificial Sequence: Synthetic oligonucleotide
uuuacaaguugaaaaauu

SEQ ID NO: 891 - RNA, 18 nt, Artificial Sequence
  Description of Artificial Sequence: Synthetic oligonucleotide
uuaauuuuacaaguugaa

SEQ ID NO: 892 - RNA, 18 nt, Artificial Sequence
  Description of Artificial Sequence: Synthetic oligonucleotide
ucaguuuaauuuuacaag

SEQ ID NO: 893 - RNA, 18 nt, Artificial Sequence
  Description of Artificial Sequence: Synthetic oligonucleotide
uucacucaguuuaauuuu

SEQ ID NO: 894 - RNA, 18 nt, Artificial Sequence
  Description of Artificial Sequence: Synthetic oligonucleotide
aucaauucacucaguuua

SEQ ID NO: 895 - RNA, 18 nt, Artificial Sequence
  Description of Artificial Sequence: Synthetic oligonucleotide
acgacaucaauucacuca

SEQ ID NO: 896 - RNA, 18 nt, Artificial Sequence
  Description of Artificial Sequence: Synthetic oligonucleotide
uauucacgacaucaauuc

SEQ ID NO: 897 - RNA, 18 nt, Artificial Sequence
  Description of Artificial Sequence: Synthetic oligonucleotide
cuagauauucacgacauc

SEQ ID NO: 898 - RNA, 18 nt, Artificial Sequence
  Description of Artificial Sequence: Synthetic oligonucleotide
uuacccuagauauucacg

SEQ ID NO: 899 - RNA, 18 nt, Artificial Sequence
  Description of Artificial Sequence: Synthetic oligonucleotide
uuauuuuacccuagauau

SEQ ID NO: 900 - RNA, 18 nt, Artificial Sequence
  Description of Artificial Sequence: Synthetic oligonucleotide
aaauuuuauuuuacccua

SEQ ID NO: 901 - RNA, 18 nt, Artificial Sequence
  Description of Artificial Sequence: Synthetic oligonucleotide
aacacaaauuuuauuuua

SEQ ID NO: 902 - RNA, 18 nt, Artificial Sequence
  Description of Artificial Sequence: Synthetic oligonucleotide
auuuaaacacaaauuuua

SEQ ID NO: 903 - RNA, 18 nt, Artificial Sequence
  Description of Artificial Sequence: Synthetic oligonucleotide
uacaaauuuaaacacaaa

SEQ ID NO: 904 - RNA, 18 nt, Artificial Sequence
  Description of Artificial Sequence: Synthetic oligonucleotide
aaaaauacaaauuuaaac

SEQ ID NO: 905 - RNA, 18 nt, Artificial Sequence
  Description of Artificial Sequence: Synthetic oligonucleotide
aaauuaaaaauacaaauu

SEQ ID NO: 906 - RNA, 18 nt, Artificial Sequence
  Description of Artificial Sequence: Synthetic oligonucleotide
uuaggaaauuaaaaauac

SEQ ID NO: 907 - RNA, 18 nt, Artificial Sequence
  Description of Artificial Sequence: Synthetic oligonucleotide
cuagguuaggaaauuaaa

SEQ ID NO: 908 - RNA, 18 nt, Artificial Sequence
  Description of Artificial Sequence: Synthetic oligonucleotide
auuuccuagguuaggaaa

SEQ ID NO: 909 - RNA, 18 nt, Artificial Sequence
  Description of Artificial Sequence: Synthetic oligonucleotide
uuaagauuuccuagguua

SEQ ID NO: 910 - RNA, 18 nt, Artificial Sequence
  Description of Artificial Sequence: Synthetic oligonucleotide
gguauuuaagauuuccua

SEQ ID NO: 911 - RNA, 18 nt, Artificial Sequence
  Description of Artificial Sequence: Synthetic oligonucleotide
aagaagguauuuaagauu

SEQ ID NO: 912 - RNA, 18 nt, Artificial Sequence
  Description of Artificial Sequence: Synthetic oligonucleotide
ugaaaaagaagguauuua

SEQ ID NO: 913 - RNA, 18 nt, Artificial Sequence
  Description of Artificial Sequence: Synthetic oligonucleotide
ucuuuugaaaaagaaggu

SEQ ID NO: 914 - RNA, 18 nt, Artificial Sequence
  Description of Artificial Sequence: Synthetic oligonucleotide
ugaguucuuuugaaaaag

SEQ ID NO: 915 - RNA, 18 nt, Artificial Sequence
  Description of Artificial Sequence: Synthetic oligonucleotide
agacuugaguucuuuuga

SEQ ID NO: 916 - RNA, 18 nt, Artificial Sequence
  Description of Artificial Sequence: Synthetic oligonucleotide
cauuaagacuugaguucu

SEQ ID NO: 917 - RNA, 18 nt, Artificial Sequence
  Description of Artificial Sequence: Synthetic oligonucleotide
cuauccauuaagacuuga

SEQ ID NO: 918 - RNA, 18 nt, Artificial Sequence
  Description of Artificial Sequence: Synthetic oligonucleotide
uuucccuauccauuaaga

SEQ ID NO: 919 - RNA, 18 nt, Artificial Sequence
  Description of Artificial Sequence: Synthetic oligonucleotide
gucuguuucccuauccau

SEQ ID NO: 920 - RNA, 18 nt, Artificial Sequence
  Description of Artificial Sequence: Synthetic oligonucleotide
uuucccuacuguggugca

SEQ ID NO: 921 - RNA, 18 nt, Artificial Sequence
  Description of Artificial Sequence: Synthetic oligonucleotide
uguauuuucccuacugug

SEQ ID NO: 922 - RNA, 18 nt, Artificial Sequence
  Description of Artificial Sequence: Synthetic oligonucleotide
aauaauguauuuucccua

SEQ ID NO: 923 - RNA, 18 nt, Artificial Sequence
  Description of Artificial Sequence: Synthetic oligonucleotide
auguaaauaauguauuuu

SEQ ID NO: 924 - RNA, 18 nt, Artificial Sequence
  Description of Artificial Sequence: Synthetic oligonucleotide
uuaggauguaaauaaugu

SEQ ID NO: 925 - RNA, 18 nt, Artificial Sequence
  Description of Artificial Sequence: Synthetic oligonucleotide
agggauuaggauguaaau

SEQ ID NO: 926 - RNA, 18 nt, Artificial Sequence
  Description of Artificial Sequence: Synthetic oligonucleotide
aaagagggaauuaggaug

SEQ ID NO: 927 - RNA, 18 nt, Artificial Sequence
  Description of Artificial Sequence: Synthetic oligonucleotide
auugaaaagaagggauua

SEQ ID NO: 928 - RNA, 18 nt, Artificial Sequence
  Description of Artificial Sequence: Synthetic oligonucleotide
agacaauugaaaagaggg

SEQ ID NO: 929 - RNA, 18 nt, Artificial Sequence
  Description of Artificial Sequence: Synthetic oligonucleotide
auuuaagacaauugaaaa

SEQ ID NO: 930 - RNA, 18 nt, Artificial Sequence
  Description of Artificial Sequence: Synthetic oligonucleotide
augaaauuuaagacaauu

SEQ ID NO: 931 - RNA, 18 nt, Artificial Sequence
  Description of Artificial Sequence: Synthetic oligonucleotide
uucaaaugaaauuuaaga

SEQ ID NO: 932 - RNA, 18 nt, Artificial Sequence
  Description of Artificial Sequence: Synthetic oligonucleotide
uuuuuuucaaaugaaauu

SEQ ID NO: 933 - RNA, 18 nt, Artificial Sequence
  Description of Artificial Sequence: Synthetic oligonucleotide
uuuuuuuuuuuucaaaug

SEQ ID NO: 934 - RNA, 18 nt, Artificial Sequence
  Description of Artificial Sequence: Synthetic oligonucleotide
aagguuuuuuuuuuuuuc

SEQ ID NO: 935 - RNA, 18 nt, Artificial Sequence
  Description of Artificial Sequence: Synthetic oligonucleotide
ucauaaagguuuuuuuuu

SEQ ID NO: 936 - RNA, 18 nt, Artificial Sequence
  Description of Artificial Sequence: Synthetic oligonucleotide
uaaauucauaaagguuuu

SEQ ID NO: 937 - RNA, 18 nt, Artificial Sequence
  Description of Artificial Sequence: Synthetic oligonucleotide
gaggguaaauucauaaag

SEQ ID NO: 938 - RNA, 18 nt, Artificial Sequence
  Description of Artificial Sequence: Synthetic oligonucleotide
ccacagaggguaaauuca

SEQ ID NO: 939 - RNA, 18 nt, Artificial Sequence
  Description of Artificial Sequence: Synthetic oligonucleotide
aaaauccacagaggguaa

SEQ ID NO: 940 - RNA, 18 nt, Artificial Sequence
  Description of Artificial Sequence: Synthetic oligonucleotide
ggguuaaaauccacagag

SEQ ID NO: 941 - RNA, 18 nt, Artificial Sequence
  Description of Artificial Sequence: Synthetic oligonucleotide
cauugggauuaaaaucca

SEQ ID NO: 942 - RNA, 18 nt, Artificial Sequence
  Description of Artificial Sequence: Synthetic oligonucleotide
ucaaccauuaggguuaaa

SEQ ID NO: 943 - RNA, 18 nt, Artificial Sequence
  Description of Artificial Sequence: Synthetic oligonucleotide
agauaucaaccauuggga

SEQ ID NO: 944 - RNA, 18 nt, Artificial Sequence
  Description of Artificial Sequence: Synthetic oligonucleotide
aauaaagauaucaaccau

SEQ ID NO: 945 - RNA, 18 nt, Artificial Sequence
  Description of Artificial Sequence: Synthetic oligonucleotide
aacuuaauaaagauauca

SEQ ID NO: 946 - RNA, 18 nt, Artificial Sequence
  Description of Artificial Sequence: Synthetic oligonucleotide
aaugaaacuuaauaaaga

SEQ ID NO: 947 - RNA, 18 nt, Artificial Sequence
  Description of Artificial Sequence: Synthetic oligonucleotide
uauucaaugaaacuuaau

SEQ ID NO: 948 - RNA, 18 nt, Artificial Sequence
  Description of Artificial Sequence: Synthetic oligonucleotide
aaucauauucaaugaaac

SEQ ID NO: 949 - RNA, 18 nt, Artificial Sequence
  Description of Artificial Sequence: Synthetic oligonucleotide
aacuaaaucauauucaau

SEQ ID NO: 950 - RNA, 18 nt, Artificial Sequence
  Description of Artificial Sequence: Synthetic oligonucleotide
cacauaacuaaaucauau

SEQ ID NO: 951 - RNA, 18 nt, Artificial Sequence
  Description of Artificial Sequence: Synthetic oligonucleotide
auauacacauaacuaaau

SEQ ID NO: 952 - RNA, 18 nt, Artificial Sequence
  Description of Artificial Sequence: Synthetic oligonucleotide
acuccauauacacauaac

SEQ ID NO: 953 - RNA, 18 nt, Artificial Sequence
  Description of Artificial Sequence: Synthetic oligonucleotide
ggauaacuccauauacac

SEQ ID NO: 954 - RNA, 18 nt, Artificial Sequence
  Description of Artificial Sequence: Synthetic oligonucleotide
aagauggauaacuccaua

SEQ ID NO: 955 - RNA, 18 nt, Artificial Sequence
  Description of Artificial Sequence: Synthetic oligonucleotide
ccccaaagauggauaacu

SEQ ID NO: 956 - RNA, 18 nt, Artificial Sequence
  Description of Artificial Sequence: Synthetic oligonucleotide
aaucuccccaaagaugga

SEQ ID NO: 957 - RNA, 18 nt, Artificial Sequence
  Description of Artificial Sequence: Synthetic oligonucleotide
ccaguaaucuccccaaag

SEQ ID NO: 958 - RNA, 18 nt, Artificial Sequence
  Description of Artificial Sequence: Synthetic oligonucleotide
ccaauccaguaaucuccc

SEQ ID NO: 959 - RNA, 18 nt, Artificial Sequence
  Description of Artificial Sequence: Synthetic oligonucleotide
ccucaccaauccaguaau

SEQ ID NO: 960 - RNA, 18 nt, Artificial Sequence
  Description of Artificial Sequence: Synthetic oligonucleotide
cccgcccucaccaaucca

SEQ ID NO: 961 - RNA, 18 nt, Artificial Sequence
  Description of Artificial Sequence: Synthetic oligonucleotide
ggucccccgcccucacca

SEQ ID NO: 962 - RNA, 18 nt, Artificial Sequence
  Description of Artificial Sequence: Synthetic oligonucleotide
accagggucccccgcccu

SEQ ID NO: 963 - RNA, 18 nt, Artificial Sequence
  Description of Artificial Sequence: Synthetic oligonucleotide
ucuacaccaggguccccc

SEQ ID NO: 964 - RNA, 18 nt, Artificial Sequence
  Description of Artificial Sequence: Synthetic oligonucleotide
aucauucuacaccagggu

SEQ ID NO: 965 - RNA, 18 nt, Artificial Sequence
  Description of Artificial Sequence: Synthetic oligonucleotide
acauaaucauucuacacc

SEQ ID NO: 966 - RNA, 18 nt, Artificial Sequence
  Description of Artificial Sequence: Synthetic oligonucleotide
uuuucacauaaucauucu

SEQ ID NO: 967 - RNA, 18 nt, Artificial Sequence
  Description of Artificial Sequence: Synthetic oligonucleotide
uuguuuuuucacauaauc

SEQ ID NO: 968 - RNA, 18 nt, Artificial Sequence
  Description of Artificial Sequence: Synthetic oligonucleotide
uuaaauuguuuuuucaca

SEQ ID NO: 969 - RNA, 18 nt, Artificial Sequence
  Description of Artificial Sequence: Synthetic oligonucleotide
acaaguuaaauuguuuuu

SEQ ID NO: 970 - RNA, 18 nt, Artificial Sequence
  Description of Artificial Sequence: Synthetic oligonucleotide
gcuuaacaaguuaaauug

SEQ ID NO: 971 - RNA, 18 nt, Artificial Sequence
  Description of Artificial Sequence: Synthetic oligonucleotide
caugagcuuaacaaguua

SEQ ID NO: 972 - RNA, 18 nt, Artificial Sequence
  Description of Artificial Sequence: Synthetic oligonucleotide
aguaucaugagcuuaaca

SEQ ID NO: 973 - RNA, 18 nt, Artificial Sequence
  Description of Artificial Sequence: Synthetic oligonucleotide
caaacaguaucaugagcu

SEQ ID NO: 974 - RNA, 18 nt, Artificial Sequence
  Description of Artificial Sequence: Synthetic oligonucleotide
ugccucaaacaguaucau

SEQ ID NO: 975 - RNA, 18 nt, Artificial Sequence
  Description of Artificial Sequence: Synthetic oligonucleotide
cuguaugccucaaacagu

SEQ ID NO: 976 - RNA, 18 nt, Artificial Sequence
  Description of Artificial Sequence: Synthetic oligonucleotide
agggacuguaugccucaa

SEQ ID NO: 977 - RNA, 18 nt, Artificial Sequence
  Description of Artificial Sequence: Synthetic oligonucleotide
acagcagggacuguaugc

SEQ ID NO: 978 - RNA, 18 nt, Artificial Sequence
  Description of Artificial Sequence: Synthetic oligonucleotide
acuaaacagcaagggcug

SEQ ID NO: 979 - RNA, 18 nt, Artificial Sequence
  Description of Artificial Sequence: Synthetic oligonucleotide
aauguacuaaacagcagg

SEQ ID NO: 980 - RNA, 18 nt, Artificial Sequence
  Description of Artificial Sequence: Synthetic oligonucleotide
agaccaauguacuaaaca

SEQ ID NO: 981 - RNA, 18 nt, Artificial Sequence
  Description of Artificial Sequence: Synthetic oligonucleotide
gacccagaccaauguacu

SEQ ID NO: 982 - RNA, 18 nt, Artificial Sequence
  Description of Artificial Sequence: Synthetic oligonucleotide
uucaggacccagaccaau

SEQ ID NO: 983 - RNA, 18 nt, Artificial Sequence
  Description of Artificial Sequence: Synthetic oligonucleotide
uaauuuucaggacccaga

SEQ ID NO: 984 - RNA, 18 nt, Artificial Sequence
  Description of Artificial Sequence: Synthetic oligonucleotide
acugguaauuuucaggac

SEQ ID NO: 985 - RNA, 18 nt, Artificial Sequence
  Description of Artificial Sequence: Synthetic oligonucleotide
aucuaacugguaauuuuc

SEQ ID NO: 986 - RNA, 18 nt, Artificial Sequence
  Description of Artificial Sequence: Synthetic oligonucleotide
augguaucuaacugguaa

SEQ ID NO: 987 - RNA, 18 nt, Artificial Sequence
  Description of Artificial Sequence: Synthetic oligonucleotide
aacugaugguaucuaacu

SEQ ID NO: 988 - RNA, 18 nt, Artificial Sequence
  Description of Artificial Sequence: Synthetic oligonucleotide
uaaucaacugaugguauc

SEQ ID NO: 989 - RNA, 18 nt, Artificial Sequence
  Description of Artificial Sequence: Synthetic oligonucleotide
aucaauaaucaacugaug

SEQ ID NO: 990 - RNA, 18 nt, Artificial Sequence
  Description of Artificial Sequence: Synthetic oligonucleotide
uacauaucaauaaucaac

SEQ ID NO: 991 - RNA, 18 nt, Artificial Sequence
  Description of Artificial Sequence: Synthetic oligonucleotide
gcucauacauaucaauaa

SEQ ID NO: 992 - RNA, 18 nt, Artificial Sequence
  Description of Artificial Sequence: Synthetic oligonucleotide
uaucugcucauacauauc

SEQ ID NO: 993 - RNA, 18 nt, Artificial Sequence
  Description of Artificial Sequence: Synthetic oligonucleotide
ccuaguaucugcucauac

SEQ ID NO: 994 - RNA, 18 nt, Artificial Sequence
  Description of Artificial Sequence: Synthetic oligonucleotide
ugcacccuaguaucugcu

SEQ ID NO: 995 - RNA, 18 nt, Artificial Sequence
  Description of Artificial Sequence: Synthetic oligonucleotide
aauauugcacccuaguau

SEQ ID NO: 996 - RNA, 18 nt, Artificial Sequence
  Description of Artificial Sequence: Synthetic oligonucleotide
ccugaaauauugcacccu

SEQ ID NO: 997 - RNA, 18 nt, Artificial Sequence
  Description of Artificial Sequence: Synthetic oligonucleotide
ugaaaccugaaauauugc

SEQ ID NO: 998 - RNA, 18 nt, Artificial Sequence
  Description of Artificial Sequence: Synthetic oligonucleotide
ucuuaugaaaccugaaau

SEQ ID NO: 999 - RNA, 18 nt, Artificial Sequence
  Description of Artificial Sequence: Synthetic oligonucleotide
accagucuuaugaaaccu

SEQ ID NO: 1000 - RNA, 18 nt, Artificial Sequence
  Description of Artificial Sequence: Synthetic oligonucleotide
ucaauaccagucuuauga

SEQ ID NO: 1001 - RNA, 18 nt, Artificial Sequence
  Description of Artificial Sequence: Synthetic oligonucleotide
cacaaucaauaccagucu

SEQ ID NO: 1002 - RNA, 18 nt, Artificial Sequence
  Description of Artificial Sequence: Synthetic oligonucleotide
guggucacaaucaauacc

SEQ ID NO: 1003 - RNA, 18 nt, Artificial Sequence
  Description of Artificial Sequence: Synthetic oligonucleotide
ugagaguggucacaauca

SEQ ID NO: 1004 - RNA, 18 nt, Artificial Sequence
  Description of Artificial Sequence: Synthetic oligonucleotide
aaaaaugagaguggucac

SEQ ID NO: 1005 - RNA, 18 nt, Artificial Sequence
  Description of Artificial Sequence: Synthetic oligonucleotide
caauaaaaaaugagagug

SEQ ID NO: 1006 - RNA, 18 nt, Artificial Sequence
  Description of Artificial Sequence: Synthetic oligonucleotide
uuacacaauaaaaaauga

SEQ ID NO: 1007 - RNA, 18 nt, Artificial Sequence
  Description of Artificial Sequence: Synthetic oligonucleotide
ugaacuuacacaauaaaa

SEQ ID NO: 1008 - RNA, 18 nt, Artificial Sequence
  Description of Artificial Sequence: Synthetic oligonucleotide
ccauaugaacuuacacaa

SEQ ID NO: 1009 - RNA, 18 nt, Artificial Sequence
  Description of Artificial Sequence: Synthetic oligonucleotide
uaaccccauaugaacuua

SEQ ID NO: 1010 - RNA, 18 nt, Artificial Sequence
  Description of Artificial Sequence: Synthetic oligonucleotide
gaaaauaaccccauauga

SEQ ID NO: 1011 - RNA, 18 nt, Artificial Sequence
  Description of Artificial Sequence: Synthetic oligonucleotide
auuuugaaaauaacccca

SEQ ID NO: 1012 - RNA, 18 nt, Artificial Sequence
  Description of Artificial Sequence: Synthetic oligonucleotide
uuaacauuuugaaaauaa

SEQ ID NO: 1013 - RNA, 18 nt, Artificial Sequence
  Description of Artificial Sequence: Synthetic oligonucleotide
ccuuguuaacauuuugaa

SEQ ID NO: 1014 - RNA, 18 nt, Artificial Sequence
  Description of Artificial Sequence: Synthetic oligonucleotide
uuuugccuuguuaacauu

SEQ ID NO: 1015 - RNA, 18 nt, Artificial Sequence
  Description of Artificial Sequence: Synthetic oligonucleotide
uauauuuuugccuuguua

SEQ ID NO: 1016 - RNA, 18 nt, Artificial Sequence
  Description of Artificial Sequence: Synthetic oligonucleotide
cuuaauauauuuuugccu

SEQ ID NO: 1017 - RNA, 18 nt, Artificial Sequence
  Description of Artificial Sequence: Synthetic oligonucleotide
uauuucuuaauauauuuu

SEQ ID NO: 1018 - RNA, 18 nt, Artificial Sequence
  Description of Artificial Sequence: Synthetic oligonucleotide
ucaacuauuucuuaauau

SEQ ID NO: 1019 - RNA, 18 nt, Artificial Sequence
  Description of Artificial Sequence: Synthetic oligonucleotide
cuuauucaacuauuucuu

SEQ ID NO: 1020 - RNA, 18 nt, Artificial Sequence
  Description of Artificial Sequence: Synthetic oligonucleotide
augugcuuauucaacuau

SEQ ID NO: 1021 - RNA, 18 nt, Artificial Sequence
  Description of Artificial Sequence: Synthetic oligonucleotide
uucacaugugcuuauuca

SEQ ID NO: 1022 - RNA, 18 nt, Artificial Sequence
  Description of Artificial Sequence: Synthetic oligonucleotide
cacaauucacaugugcuu

SEQ ID NO: 1023 - RNA, 18 nt, Artificial Sequence
  Description of Artificial Sequence: Synthetic oligonucleotide
uacaacacaauucacaug

SEQ ID NO: 1024 - RNA, 18 nt, Artificial Sequence
  Description of Artificial Sequence: Synthetic oligonucleotide
uuguuuacaacacaauuc

SEQ ID NO: 1025 - RNA, 18 nt, Artificial Sequence
  Description of Artificial Sequence: Synthetic oligonucleotide
acuuuuuguuuacaacac

SEQ ID NO: 1026 - RNA, 18 nt, Artificial Sequence
  Description of Artificial Sequence: Synthetic oligonucleotide
uucuaacuuuuuguuuac

SEQ ID NO: 1027 - RNA, 18 nt, Artificial Sequence
  Description of Artificial Sequence: Synthetic oligonucleotide
uuuuauucuaacuuuuug

SEQ ID NO: 1028 - RNA, 18 nt, Artificial Sequence
  Description of Artificial Sequence: Synthetic oligonucleotide
gauuuuuuuauucuaacu

SEQ ID NO: 1029 - RNA, 18 nt, Artificial Sequence
  Description of Artificial Sequence: Synthetic oligonucleotide
aaguggauuuuuuuauuc

SEQ ID NO: 1030 - RNA, 18 nt, Artificial Sequence
  Description of Artificial Sequence: Synthetic oligonucleotide
caaauaaguggauuuuuu

SEQ ID NO: 1031 - RNA, 18 nt, Artificial Sequence
  Description of Artificial Sequence: Synthetic oligonucleotide
uaauucaaauaaguggau

SEQ ID NO: 1032 - RNA, 18 nt, Artificial Sequence
  Description of Artificial Sequence: Synthetic oligonucleotide
cugcauaauucaaauaag

SEQ ID NO: 1033 - RNA, 18 nt, Artificial Sequence
  Description of Artificial Sequence: Synthetic oligonucleotide
cuauucugcauaauucaa

SEQ ID NO: 1034 - RNA, 18 nt, Artificial Sequence
  Description of Artificial Sequence: Synthetic oligonucleotide
guauucuauucugcauaa

SEQ ID NO: 1035 - RNA, 18 nt, Artificial Sequence
  Description of Artificial Sequence: Synthetic oligonucleotide
gguauguauucuauucug

SEQ ID NO: 1036 - RNA, 18 nt, Artificial Sequence
  Description of Artificial Sequence: Synthetic oligonucleotide
uucuagguauguauucua

SEQ ID NO: 1037 - RNA, 18 nt, Artificial Sequence
  Description of Artificial Sequence: Synthetic oligonucleotide
uuuauuucuagguaugua

SEQ ID NO: 1038 - RNA, 18 nt, Artificial Sequence
  Description of Artificial Sequence: Synthetic oligonucleotide
uuuguuuuauuucuaggu

SEQ ID NO: 1039 - RNA, 18 nt, Artificial Sequence
  Description of Artificial Sequence: Synthetic oligonucleotide
acguuuuuguuuuauuuc

SEQ ID NO: 1040 - RNA, 18 nt, Artificial Sequence
  Description of Artificial Sequence: Synthetic oligonucleotide
auaagacguuuuuguuuu

SEQ ID NO: 1041 - RNA, 18 nt, Artificial Sequence
  Description of Artificial Sequence: Synthetic oligonucleotide
ucaugauaagacguuuuu

SEQ ID NO: 1042 - RNA, 18 nt, Artificial Sequence
  Description of Artificial Sequence: Synthetic oligonucleotide
aauacucaugauaagacg

SEQ ID NO: 1043 - RNA, 18 nt, Artificial Sequence
  Description of Artificial Sequence: Synthetic oligonucleotide
aucuuaauacucaugaua

SEQ ID NO: 1044 - RNA, 18 nt, Artificial Sequence
  Description of Artificial Sequence: Synthetic oligonucleotide
auuuuaucuuaauacuca

SEQ ID NO: 1045 - RNA, 18 nt, Artificial Sequence
  Description of Artificial Sequence: Synthetic oligonucleotide
cuuaaauuuuaucuuaau

SEQ ID NO: 1046 - RNA, 18 nt, Artificial Sequence
  Description of Artificial Sequence: Synthetic oligonucleotide
uaugccuuaaauuuuauc

SEQ ID NO: 1047 - RNA, 18 nt, Artificial Sequence
  Description of Artificial Sequence: Synthetic oligonucleotide
gaguuuaugccuuaaauu

SEQ ID NO: 1048 - RNA, 18 nt, Artificial Sequence
  Description of Artificial Sequence: Synthetic oligonucleotide
gaagugaguuuaugccuu

SEQ ID NO: 1049 - RNA, 18 nt, Artificial Sequence
  Description of Artificial Sequence: Synthetic oligonucleotide
ucuaagaagugaguuuau

SEQ ID NO: 1050 - RNA, 18 nt, Artificial Sequence
  Description of Artificial Sequence: Synthetic oligonucleotide
cuuauucuaagaagugag

SEQ ID NO: 1051 - RNA, 18 nt, Artificial Sequence
  Description of Artificial Sequence: Synthetic oligonucleotide
aguuacuuauucuaagaa

SEQ ID NO: 1052 - RNA, 18 nt, Artificial Sequence
  Description of Artificial Sequence: Synthetic oligonucleotide
uugggaguuacuuauucu

SEQ ID NO: 1053 - RNA, 18 nt, Artificial Sequence
  Description of Artificial Sequence: Synthetic oligonucleotide
guuaguugggaguuacuu

SEQ ID NO: 1054 - RNA, 18 nt, Artificial Sequence
  Description of Artificial Sequence: Synthetic oligonucleotide
agaaaguuaguugggagu

SEQ ID NO: 1055 - RNA, 18 nt, Artificial Sequence
  Description of Artificial Sequence: Synthetic oligonucleotide
auccuagaaaguuaguug

SEQ ID NO: 1056 - RNA, 18 nt, Artificial Sequence
  Description of Artificial Sequence: Synthetic oligonucleotide
uuaaaauccuagaaaguu

SEQ ID NO: 1057 - RNA, 18 nt, Artificial Sequence
  Description of Artificial Sequence: Synthetic oligonucleotide
auguuuuaaaauccuaga

SEQ ID NO: 1058 - RNA, 18 nt, Artificial Sequence
  Description of Artificial Sequence: Synthetic oligonucleotide
guguuauguuuuaaaauc

SEQ ID NO: 1059 - RNA, 18 nt, Artificial Sequence
  Description of Artificial Sequence: Synthetic oligonucleotide
ucacuguguuauguuuua

SEQ ID NO: 1060 - RNA, 18 nt, Artificial Sequence
  Description of Artificial Sequence: Synthetic oligonucleotide
uguuuucacuguguuaug

SEQ ID NO: 1061 - RNA, 18 nt, Artificial Sequence
  Description of Artificial Sequence: Synthetic oligonucleotide
auguauguuuucacugug

SEQ ID NO: 1062 - RNA, 18 nt, Artificial Sequence
  Description of Artificial Sequence: Synthetic oligonucleotide
uguuuauguauguuuuca

SEQ ID NO: 1063 - RNA, 18 nt, Artificial Sequence
  Description of Artificial Sequence: Synthetic oligonucleotide
aguuauguuuauguaugu

SEQ ID NO: 1064 - RNA, 18 nt, Artificial Sequence
  Description of Artificial Sequence: Synthetic oligonucleotide
uguagaguuauguuuaug

SEQ ID NO: 1065 - RNA, 18 nt, Artificial Sequence
  Description of Artificial Sequence: Synthetic oligonucleotide
uaaaauguagaguuaugu

SEQ ID NO: 1066 - RNA, 18 nt, Artificial Sequence
  Description of Artificial Sequence: Synthetic oligonucleotide
auaaauaaaauguagagu

SEQ ID NO: 1067 - RNA, 18 nt, Artificial Sequence
  Description of Artificial Sequence: Synthetic oligonucleotide
uaagaauaaauaaaaugu

SEQ ID NO: 1068 - RNA, 18 nt, Artificial Sequence
  Description of Artificial Sequence: Synthetic oligonucleotide
aacuuuaagaauaaauaa

SEQ ID NO: 1069 - RNA, 18 nt, Artificial Sequence
  Description of Artificial Sequence: Synthetic oligonucleotide
acuuaaacuuuaagaaua

SEQ ID NO: 1070 - RNA, 18 nt, Artificial Sequence
  Description of Artificial Sequence: Synthetic oligonucleotide
aauacacuuaaacuuuaa

SEQ ID NO: 1071 - RNA, 18 nt, Artificial Sequence
  Description of Artificial Sequence: Synthetic oligonucleotide
uguauaauacacuuaaac

SEQ ID NO: 1072 - RNA, 18 nt, Artificial Sequence
  Description of Artificial Sequence: Synthetic oligonucleotide
cuucuuguauaauacacu

SEQ ID NO: 1073 - RNA, 18 nt, Artificial Sequence
  Description of Artificial Sequence: Synthetic oligonucleotide
cucuucuucuuguauaau

SEQ ID NO: 1074 - RNA, 18 nt, Artificial Sequence
  Description of Artificial Sequence: Synthetic oligonucleotide
auaaacucuucuucuugu

SEQ ID NO: 1075 - RNA, 18 nt, Artificial Sequence
  Description of Artificial Sequence: Synthetic oligonucleotide
cgaauauaaacucuucuu

SEQ ID NO: 1076 - RNA, 18 nt, Artificial Sequence
  Description of Artificial Sequence: Synthetic oligonucleotide
ucucucgaauauaaacuc

SEQ ID NO: 1077 - RNA, 18 nt, Artificial Sequence
  Description of Artificial Sequence: Synthetic oligonucleotide
uucugucucucgaauaua

SEQ ID NO: 1078 - RNA, 18 nt, Artificial Sequence
  Description of Artificial Sequence: Synthetic oligonucleotide
acuuuuucugucucucga

SEQ ID NO: 1079 - RNA, 18 nt, Artificial Sequence
  Description of Artificial Sequence: Synthetic oligonucleotide
uucugacuuuuucugucu

SEQ ID NO: 1080 - RNA, 18 nt, Artificial Sequence
  Description of Artificial Sequence: Synthetic oligonucleotide
aaaaauucugacuuuuuc

SEQ ID NO: 1081 - RNA, 18 nt, Artificial Sequence
  Description of Artificial Sequence: Synthetic oligonucleotide
caaacaaaaauucugacu

SEQ ID NO: 1082 - RNA, 18 nt, Artificial Sequence
  Description of Artificial Sequence: Synthetic oligonucleotide
ugauccaaacaaaaauuc

SEQ ID NO: 1083 - RNA, 18 nt, Artificial Sequence
  Description of Artificial Sequence: Synthetic oligonucleotide
auuggugauccaaacaaa

SEQ ID NO: 1084 - RNA, 18 nt, Artificial Sequence
  Description of Artificial Sequence: Synthetic oligonucleotide
gauauauuggugauccaa

SEQ ID NO: 1085 - RNA, 18 nt, Artificial Sequence
  Description of Artificial Sequence: Synthetic oligonucleotide
gcuaugauauauugguga

SEQ ID NO: 1086 - RNA, 18 nt, Artificial Sequence
  Description of Artificial Sequence: Synthetic oligonucleotide
uguaagcuaugauauauu

SEQ ID NO: 1087 - RNA, 18 nt, Artificial Sequence
  Description of Artificial Sequence: Synthetic oligonucleotide
uuuuuuguaagcuaugau

SEQ ID NO: 1088 - RNA, 18 nt, Artificial Sequence
  Description of Artificial Sequence: Synthetic oligonucleotide
acaguuuuuuuguaagcu

SEQ ID NO: 1089 - RNA, 18 nt, Artificial Sequence
  Description of Artificial Sequence: Synthetic oligonucleotide
uuaagacaguuuuuuugu

SEQ ID NO: 1090 - RNA, 18 nt, Artificial Sequence
  Description of Artificial Sequence: Synthetic oligonucleotide
uuuaauuaagacaguuuu

SEQ ID NO: 1091 - RNA, 18 nt, Artificial Sequence
  Description of Artificial Sequence: Synthetic oligonucleotide
uggguuuuaauuaagaca

SEQ ID NO: 1092 - RNA, 18 nt, Artificial Sequence
  Description of Artificial Sequence: Synthetic oligonucleotide
uguuguggguuuuaauua

SEQ ID NO: 1093 - RNA, 18 nt, Artificial Sequence
  Description of Artificial Sequence: Synthetic oligonucleotide
aauuauguuguggguuuu

SEQ ID NO: 1094 - RNA, 18 nt, Artificial Sequence
  Description of Artificial Sequence: Synthetic oligonucleotide
aaaaaaauuauguugugg

SEQ ID NO: 1095 - RNA, 18 nt, Artificial Sequence
  Description of Artificial Sequence: Synthetic oligonucleotide
aaucuaaaaaaauuaugu

SEQ ID NO: 1096 - RNA, 18 nt, Artificial Sequence
  Description of Artificial Sequence: Synthetic oligonucleotide
uuaaaaaucuaaaaaaau

SEQ ID NO: 1097 - RNA, 18 nt, Artificial Sequence
  Description of Artificial Sequence: Synthetic oligonucleotide
cuuucuuaaaaaucuaaa

SEQ ID NO: 1098 - RNA, 18 nt, Artificial Sequence
  Description of Artificial Sequence: Synthetic oligonucleotide
agaaucuuucuuaaaaau

SEQ ID NO: 1099 - RNA, 18 nt, Artificial Sequence
  Description of Artificial Sequence: Synthetic oligonucleotide
auaauagaaucuuucuua

SEQ ID NO: 1100 - DNA, 264 bp, Homo sapiens
ggaaacagacggagagcatcatgaacaaaaagtaacaccaaatgttctgtcatatcagatttctaactaataacaaactatatatttctattttgtataggataatcttgctccaacttggatggggtggagcgctggttcctcccctgagccctttattatgggtactgtattaccccttttgctacctttaatccttgcactgtgacttatgtgtagtggggtgagggagggattgggaagggtactattattgcaccacag
